(19) United States
(12) Patent Application Publication
(10) Pub. No.: US 2026/0159829 A1
(43) Pub. Date: Jun. 11, 2026

(54) METHODS AND SYSTEMS FOR TARGET CAPTURE LONG-READ SEQUENCING WITH MULTIPLEXING

(71) Applicants: Monica Sentmanat, St. Louis, MO (US); Xiaoxia Cui, St. Louis, MO (US)

(72) Inventors: Monica Sentmanat, St. Louis, MO (US); Xiaoxia Cui, St. Louis, MO (US)

(73) Assignee: Washington University, St. Louis, MO (US)

(21) Appl. No.: 19/387,616

(22) Filed: Nov. 12, 2025

Related U.S. Application Data
(60) Provisional application No. 63/719,601, filed on Nov. 12, 2024.

(51) Int. Cl. C12N 15/10; C12N 5/073; C12N 5/074; C12N 9/22; C12N 15/11; C12N 15/86; C12N 15/90

(52) U.S. Cl. CPC C12N 15/1065; C12N 5/0604; C12N 5/0696; C12N 9/226; C12N 15/11; C12N 15/86; C12N 15/907; C12N 2310/20; C12N 2510/00; C12N 2750/14143

(57) ABSTRACT

Assays and methods for target-capture long-read sequencing, including multiplexed assays and methods, are provided. Knockin models and constructs are also provided. In exemplary embodiments, multiple AAV donors are used, including at least two rAAV donors.

### CROSS-REFERENCE TO RELATED APPLICATIONS

[0001] This application claims priority from U.S. Provisional Application Ser. No. 63/719,601 filed on Nov. 12, 2024, which is incorporated herein by reference in its entirety.

### STATEMENT OF FEDERALLY SPONSORED RESEARCH OR DEVELOPMENT

[0002] Not applicable.

### MATERIAL INCORPORATED BY REFERENCE

[0003] The Sequence Listing, which is a part of the present disclosure, includes a computer-readable form comprising nucleotide and/or amino acid sequences of the present invention (file name “020942-US-NP_2025-11-12_Sequence-Listing” created 7 Nov. 2025; 1,583,987 bytes). The subject matter of the Sequence Listing is incorporated herein by reference in its entirety.

### FIELD

[0004] The present disclosure generally relates to methods of sample preparation and long-read sequencing assays.

### BACKGROUND

[0005] Genome engineering is indispensable for both emerging medical applications, such as gene and cell therapies, and the creation of research tools, including cell lines and model organisms. The continuous advancement of programmable nucleases, especially since the advent of CRISPR technologies in 2012, enables the introduction of increasingly sophisticated genomic modifications, allowing the recapitulation or correction of disease-relevant patient mutations, delivery of precise therapeutic cargos, or generation of a wide variety types of research models (e.g., floxed alleles, reporter lines, inducible expression) to facilitate mechanistic studies. However, site-specific large insertions remain far more challenging than simpler modifications such as knockouts, deletions, and point mutations.

[0006] Editing single-cell mouse embryos is limited in embryo numbers, both because of the source of the embryos and the need of surgical implantation post manipulation. Electroporation of CRISPR RNPs and small single-stranded DNA donors into mouse embryos circumvents the need for microinjection and enables more embryos to be edited and implanted with remarkable efficiency for point mutations and small inserts, such as loxP site. Plasmid DNA donors, however, must be microinjected into individual embryos, limiting throughput. The issue was partially addressed when rAAV donors were shown to sufficiently mediate HDR via simple incubation prior to electroporation of embryos with RNPs, bypassing the need for pronuclear microinjection.

[0007] One limitation of using rAAV is its maximum 4.7 kb payload, restricting insert size. Successful large insertions are commonly identified by junction PCRs spanning from the insert into genomic sequences adjacent to homology arms. PCRs do not always work across the insertion junctions even when an integration occurs, depending on the locus and sequence context. This leads to substantial challenges with false negatives, as a failed PCR cannot be distinguished from a failed integration, and there are no obvious positive controls for these reactions. In addition, DNA templates in either plasmid or viral forms can randomly integrate into the genome, which may confound the intended use of the engineered research model.

[0008] While high fidelity, long-read, whole genome sequencing with deep coverage is ideal for thorough characterization of the edited genome, it is too costly and low-throughput as a screening tool. Targeted alternatives have been described, namely Cas9-targeted sequencing (nCATS) with or without long DNA size-selection steps, but the on-target coverage and throughput are too low for screening multiple founders and/or clones.

[0009] Overall, two bottlenecks exist for screening mice for targeted insertion of large cassettes (>500 bp) by long-read sequencing. First, low-input material is typically the starting point. The reason is that only a small amount of tissue (<2-3 mm) can be collected from live mice intended for breeding. The tissue is usually a 1-2 mm tail snip, which makes it challenging to extract high-quality, high-molecular-weight material. Yields are typically less than 1-2 ug and vary across samples. However, there are no unbiased, pre-amplification processes currently available to enable the required representation of all samples. Second, cost is prohibitory and reduced cost methods are needed.

### BRIEF DESCRIPTION OF THE DISCLOSURE

[0010] Among the various aspects of the present disclosure is the provision of multiplexed long-read sequencing.

[0011] In accordance with an aspect of the present disclosure, a method for preparing long-read sequence samples for multiplexing is provided. The method comprising: providing a genomic DNA sample; barcoding the genomic DNA sample with an adapted Tn5 barcode to generate a barcoded material; fragmenting the barcoded material, wherein the fragmented barcoded material is longer than about 2 kb; and amplifying the fragmented barcoded material prior to multiplexing.

[0012] In some embodiments, the genomic DNA sample is a low-input genomic DNA sample, such as comprising at least about 250 ng and not more than about 5 μg. In some embodiments, the adapted Tn5 barcode is pre-loaded with unique universal flanking sequences, such as comprising Illumina P5 and P7. In some embodiments, the fragmenting is performed at a temperature of about 37° C., with a buffer comprising PEG, TAPS, and MgCl₂, and/or comprises an incubation time of at least about 15 minutes and not more than about 20 minutes. In some embodiments, the barcoding and fragmenting steps are performed simultaneously in a tagmentation step. In some embodiments, the amplifying is performed in two rounds of PCR.

[0013] In accordance with another aspect of the present disclosure, a method for generating a knockin (KI) model is provided. The method comprising: providing at least two rAAV donor vectors; and inserting the more than one rAAV donor vectors with CRISPR/Cas9 to generate the KI model.

[0014] In some embodiments, the KI model is a multi-kilobase KI model. In some embodiments, providing at least two rAAV donor vectors comprises providing at least three rAAV donor vectors. In some embodiments, the KI model is a mouse embryo KI model. In some embodiments, the KI model is an iPSC cell line KI model.

[0015] In accordance with a further aspect of the present disclosure, a knockin (KI) model is provided. The KI model having been synthesized according to the method comprising: providing at least two rAAV donor vectors; and inserting the more than one rAAV donor vectors with CRISPR/Cas9 to generate the KI model.

[0016] In some embodiments, the KI model is a multi-kilobase KI model. In some embodiments, providing at least two rAAV donor vectors comprises providing at least three rAAV donor vectors. In some embodiments, the KI model is a mouse embryo KI model. In some embodiments, the KI model is an iPSC cell line KI model.

[0017] Other objects and features will be in part apparent and in part pointed out hereinafter.

### BRIEF DESCRIPTION OF THE DRAWINGS

[0018] The patent or application file contains at least one drawing executed in color. Copies of this patent or patent application publication with color drawing(s) will be provided by the Office upon request and payment of the necessary fee.

[0019] Those of skill in the art will understand that the drawings described herein are for illustrative purposes only. The drawings are not intended to limit the scope of the present teachings in any way.

[0020] FIG. 1 is a schematic describing long-read sequencing methods of the present disclosure.

[0021] FIG. 2A is a schematic of rAAV donor and junction PCR designs.

[0022] FIG. 2B is a scatter plot of KI efficiency by junction PCRs vs. insert length in 108 single rAAV KI models and

[0023] FIG. 2C is a scatter plot of KI efficiency vs. Insert length/total homology length. R represents Pearson's correlation coefficient between x- and y-axis values shown.

[0024] FIG. 2D is a boxplot comparing HDR efficiency of direct insertion using a single gRNA vs. gene replacement KI models using two gRNAs. n.s. represents not significant with a p-value cut-off of >0.05 for significance.

[0025] FIG. 3A is a schematic of sequential insertions using two or three co-delivered rAAV donors.

[0026] FIG. 3B is a scatter plot of KI efficiency by junction PCRs vs. insert length in 16 models with two- (blue dots) and three-rAAVs (red dots).

[0027] FIG. 4A is a schematic of LOCK-seq.

[0028] FIG. 4B is a dotplot of read depth (log 2 normalized) per base across the XCB528 mCherry insertion (schematic on top). Dashed vertical lines (blue) mark boundaries of insert and homology arms. Red arrows point to copy number variation.

[0029] FIG. 4C is an IGV screenshot of aligned bam file for Project MS2757 illustrating multiple individual raw reads (grey bars) that cover the length of the cassette and extend into flanking genomic regions for both KI and wild-type alleles. The black horizonal bar across read indicates absence of FKBP-V insert, illustrating the heterozygous state of the F1 animal sequenced. Raw, uncorrected reads are shown, vertical purple bars within reads indicate sequencing error.

[0030] FIG. 4D is a dotplot of read depth (log 2 normalized) per base across the longer insert mediated by XCC113 3-rAAV donors. Dashed vertical lines (blue) mark boundaries of genetic regions: gen5, 5′ genomic; L and R, left and right homology arms, CAG, CAG promoter; LSL: floxed polyA signals; Per1, cDNA variants (hashed boxes); pA, polyA signal. Red arrows mark copy number variation.

[0031] FIG. 5A is a schematic of an unintended editing outcome in mice: random integration at unrelated, non-target loci.

[0032] FIG. 5B is a schematic of an unintended editing outcome in mice: deletion of repetitive element.

[0033] FIG. 5C is a schematic of an unintended editing outcome in mice: donor concatenation at the target site.

[0034] FIG. 5D is a schematic of an unintended editing outcome in mice; and imprecise KI resulting in additional sequence at 5′ end of transgene.

[0035] FIG. 6A is a schematic of probe generation and tiled probes across transgene.

[0036] FIG. 6B is a line graph of uniformity of coverage across samples FIG. 6C is a violin plot of lengths (bp) of mapped reads,

[0037] FIG. 6D is a graph of total mapped read counts.

[0038] FIG. 6E is a graph of capture efficiency (mapped reads/total reads).

[0039] FIG. 7A is a bar graph of HDR and NHEJ for BV2 and N2a cell lines using an ssODN template with CRISPR/Cas9. Projects MS2030 and XC10218, are an insertion of a loxP site with a BamHI site; MS2071 and XC101918, are a two base pair change from AG to CC and CC to TG, respectively.

[0040] FIG. 7B is a table of KI efficiency of three related 3-rAAV projects, Project XCC113, in BV2 cells. The size of each donor insert (bp) and total number of clones screened, resulting hits, and percent efficiency (hits/total clones) is reported.

[0041] FIG. 8 is a workflow schematic of the sequencing methods of the present disclosure. First, reads are aligned to the donor construct (including homology arms), then mapped reads (fastq) are pulled to assemble (fasta) the on-target editing events using Canu. Not all editing events are precise or on-target. When indels or mutations are present, they are evident in the assembly. These donor-specific mapped reads (fastq) will contain overhangs that map to the flanking genomic regions if an on-target event occurred or will have genomic regions that map elsewhere if a random integration occurred. In the second step, the mapped reads (fastq) are mapped to mm39 to determine where in the genome donor-specific reads map. If both on-target and random integrations occurred, high read depth at the on-target site (>40% of total mapped reads) will be identified, in addition to high read depth at the candidate off-target sites (>20% of total mapped reads).

[0042] FIG. 9 is a schematic of gene replacement strategy used in the study where two gRNAs are used to excise the region marked for replacement, i.e. concomitant deletion and knock-in (e.g. MS2742/MS2746). The homology arms are designed to flank the replacement region, outside of both cut sites and with 500-1000 bp in length each.

[0043] FIG. 10 is a schematic of conditional expression configuration in the ROSA26 locus, inserted with the first rAAV donor of the cassette containing the CAG promoter, floxed 3xSV40 poly A and a BGH poly A signal. The cDNA to be expressed will be inserted into the XCB1202b.sp2 gRNA site on a second donor. Sperm from males harboring this “recipient” site was frozen down to be used in IVT for fertilized eggs so that only rAAV donors delivering cDNAs are needed for future targeting.

[0044] FIG. 11A is a schematic of rAAV donor and junction PCR designs of a “failed” project.

[0045] FIG. 11B is a gel image of 22 animals positive for internal PCRs specific to cDNA transgenes, and

[0046] FIG. 11C is a gel image of 13/22 of internal PCR positive animals also positive for 3′ junction PCR.

[0047] FIG. 11D is a table of 5′ junction PCRs attempted and negative results across 22 animals positive for internal and/or 3′ junction.

[0048] FIG. 11E is a summary table of PCR results illustrating a labor intensive and inconclusive screening odyssey.

[0049] FIG. 12A is a schematic of x3 rAAV donor KI for XCC113-Wt (7.14% at 3/42 F0 pups positive) showing left and right homology arms on either side of the three donor inserts (green, yellow, purple), upstream and downstream (grey) flanking genomic regions. Primers (arrows) for two internal (B-C) and four junction PCRs (A, D, E, F) are shown.

[0050] FIG. 12B is a gel image of PCR products for FOs screened by junction A PCR. Arrows point to expected band sizes. Animal 20 was negative for junction A (*) but was maintained as putative hit since positive control also failed to amplify.

[0051] FIG. 12C is a gel image of PCR products for FOs screened by junction B PCR. Arrows point to expected band sizes.

[0052] FIG. 12D is a gel image of PCR products for FOs screened by junction C PCR. Arrows point to expected band sizes. PCR-based screening can result in incorrectly sized bands (**, junction C high background), double banding (junction C hits), weak bands (\hat{ }), and inconclusive results across difficult to amplify regions. Additionally, it is hard to determine whether all these products were amplified from the same allele.

[0053] FIG. 12E is a gel image of PCR products for FOs screened by junction D PCR. Arrows point to expected band sizes.

[0054] FIG. 12F is a gel image of PCR products for FOs screened by junction E PCR. Arrows point to expected band sizes. Junction E failed to produce positive band for positive control, suggesting further optimization is required. This junction was not used to identify putative hits.

[0055] FIG. 12G is a gel image of PCR products for FOs screened by junction F PCR. Arrows point to expected band sizes.

[0056] FIG. 13A is a schematic of x1 rAAV donor KI showing left (red) and right (blue) homology arms on either side of donor KI (green), upstream and downstream (grey, 5′ gen and 3′ gen) flanking genomic regions. Primers (arrows) for 5″ and 3′ ITR-specific amplification are shown.

[0057] FIG. 13B is a pair of gel images of PCR products for junction positive FOs screened by each set of primers.

[0058] FIG. 13C is a boxplot of percent positive for ITRs of total junction positive animals for 21 projects.

[0059] FIG. 14A is a violin plot of mapped read lengths from Cas9-seq compared to LOCK-seq.

[0060] FIG. 14B is a table of flow cell (R10.4.1) output for Cas9-seq and LOCK-seq, capture efficiency (mapped reads/total), average read length and number of samples multiplexed on a single flow cell.

[0061] FIG. 14C is a screenshot of IGV browser loaded with donor reference sequence and Cas9-seq vs. LOCK-seq bam files zoomed to expected −432 bp expected deletion. Samples are Per1 XCC113 also shown in FIG. 5D, LOCK-seq data shown in FIG. 5D.

[0062] FIG. 15A is a cartoon of typical probe design spanning the full-length donor including homology arms (e.g. Allele 2). The homology arms are present on all copies since they are designed to target an endogenous genomic locus.

[0063] FIG. 15B is an IGV screenshot of mapped reads show the non-targeted allele (or wild-type) is missing the 2.4 kb insert but has homology arms present while the knock-in allele has the 2.4 kb insert (dashed grey box for Allele 2).

[0064] FIG. 15C is a Snapgene screenshot for alignments of contigs for both alleles of a heterozygous KI animal resulting from the breeding of a mosaic FOs to wild-type.

[0065] FIG. 16(A-D) is set of Snapgene alignments of contiguous reads spanning the 5′ genomic region upstream of HA-L to 3′ genomic region downstream of HA-R for M24 (FIG. 16A), F19 (FIG. 16B), F20 (FIG. 16C), and F21 (FIG. 16D) that map entire KI cassette (homology arms in yellow, mCherry in red) and flanking genomic sequence.

[0066] FIG. 16E is a barplot of full-length contiguous reads mapping to the top (blue) or bottom (red) strands of the donor (and homology arms) and flanking genomic DNA.

[0067] FIG. 17 is an IGV screenshot of raw reads aligned to Project MS2757 (see SEQ ID NO: 17-318) donor sequence. Purple arrows along top horizonal region below coverage plot indicate “insertion” events, or more likely sequence error. Each grey bar is a single read with purple vertical lines indicating insertion or error within the read. Deletions are shown as horizonal black bars with numbers indicating the total number of missing bases. Non-sequencing error is supported by multiple reads, as shown for the FKBP-V region, where the F1 sequence is heterozygous with roughly half of the reads containing the FKBP-V sequence and the other half not. Pink outline at the end of the reads indicate soft-clipping of the read where additional sequence beyond what is show fails to align to the reference provided. In most cases, there is adapter sequence beyond that fails to align. The last three reads are described in more detail in FIG. 18 below.

[0068] FIG. 18 is an IGV screenshot of raw reads aligned to Project MS2757 (see SEQ ID NO: 17-318) donor sequence. Pile-up of three reads at the bottom with shared soft-clipped regions is due to the partial homology (88.5%) to chromosome 14 (mm10, 88.5% chr14:76636541-76636861, 321 bases). These reads have primary alignments to chr14 with the soft-clipped full-length reads mapping to the same region for all three.

[0069] FIG. 19A is a gel image and sequencing data for random integration event upstream of Slc6a15.

[0070] FIG. 19B is a gel image and sequencing data for random integration event within the first intron of Cd63.

[0071] FIG. 20A is a schematic of concatenation event and primer binding sites (red arrows) for PCR validation.

[0072] FIG. 20B is a gel image for validation PCRs showing positive 1.4 kb product for two F2 samples with WT Per1 cassettes.

[0073] FIG. 20C is a screen shot of alignments of 5′ and 3′ sequencing results for WT F2.1 (top) and WT F2.2 (bottom).

[0074] FIG. 21A is a schematic of two unrelated projects with unique insert (A vs. B) knockin. Each sample carried through each step of LOCK-seq, including barcoding, hybridization, ONT library prep, and ONT sequencing. MinION runs were analyzed to look for fusion reads where one read aligned to both unique insertion events from the two unrelated projects.

[0075] FIG. 21B is a graph wherein two independent runs were analyzed, each with different projects and samples. In both cases, the total number of fusion reads across samples was <2%.

[0076] FIG. 22A a set of flow cytometry of iPSCs edited with RNPs and a cDNA-GFP donor in rAAV vs plasmid format.

[0077] FIG. 22B is a pair of gel images of 5′ and 3′ junctions for 59 single-cell derived iPSC clones from a pool edited with cDNA-GFP donor in rAAV format. Numbers on top of lanes indicate clone IDs positive for 5′ and 3′ junctions, and asterisks indicate those clones only positive for a single junction. Gel image also shown in FIG. 26C to compare to alternative screening method.

[0078] FIG. 23A is a pair of gel images of high efficiency and consistence of positive junction PCR amplifications from single-cell BV2 clones transduced with x3 rAAV donors for sequential knock-in of WT Per1. All gels show multiplexed PCR for 3′ junction PCRs (larger 2.6 kb band) between donor 3 and 3′ genomic DNA as well as amplification of a 0.4 kb region of Nsmce3 as a loading control.

[0079] FIG. 23B is a pair of gel images of high efficiency and consistence of positive junction PCR amplifications from single-cell BV2 clones transduced with x3 rAAV donors for sequential knock-in of Per1 mutant with a 54 bp deletion. All gels show multiplexed PCR for 3′ junction PCRs (larger 2.6 kb band) between donor 3 and 3′ genomic DNA as well as amplification of a 0.4 kb region of Nsmce3 as a loading control.

[0080] FIG. 23C is a pair of gel images of high efficiency and consistence of positive junction PCR amplifications from single-cell BV2 clones transduced with x3 rAAV donors for sequential knock-in of −432 bp deletion. All gels show multiplexed PCR for 3′ junction PCRs (larger 2.6 kb band) between donor 3 and 3′ genomic DNA as well as amplification of a 0.4 kb region of Nsmce3 as a loading control.

[0081] FIG. 24A is a schematic showing that both rAAV donors and two RNPs are introduced to the embryos or cells at the same time. The first gRNA cleaves the genomic target site to mediate HDR from the first donor (1^{st} insertion), and successful knockin of the first insert introduces in the second, unique gRNA target site into the allele. The second gRNA target site is not cleavable in the single stranded rAAV genome. The second RNP then cleaves the newly introduced gRNA site, allowing the second insertion to occur via HDR (2^{nd} insertion).

[0082] FIG. 24B is a schematic showing that in the absence of the second gRNA, a seamless recombinant rAAV donor could be generated by recombination of ssDNA rAAV donors at regions of shared homology.

[0083] FIG. 25A is a schematic of primers used for five junction PCRs listed A-E. Homology arms (yellow bars) of second rAAV donor are annotated.

[0084] FIG. 25B is a set of gel images of validation PCRs of candidate hits 1-13, no template control is 14, from HEK293 Ts edited using 2 gRNAs (8 positives out of 76 screened) vs. 1 gRNA (2 positive out of 73 screened).

[0085] FIG. 25C is a set of gel images of validation PCRs of candidate hits 1-38, no template control is 39, from iPSCs edited using 2 gRNAs (17 positives out of 211 screened) vs. 1 gRNA (3 positives out of 218 screened). Even though without cleavage by the gRNA brought in by donor 1, the second donor was able to insert at a lower level, implying the possibility of recombination between donors 1 and 2 prior to HDR.

[0086] FIG. 25D is a table of types of double rAAV KI in HEK293K and iPSCs.

[0087] FIG. 26A is a schematic of rAAV sigle donor used for knock-in in iPSCs with primer binding sites shown used for 5′ and 3′ junction PCRs.

[0088] FIG. 26B is a circle plot of mean log 2 coverage across 59 clones screened by LOCK-seq.

[0089] FIG. 26C is a gel image of 5′ and 3′ junction PCRs (see also FIG. 11(B-C)).

[0090] FIG. 26D is a table of ranking of clones based on highest to lowest mean log 2 coverage showing that LOCK-seq.

[0091] FIG. 27A is a workflow schematic for evaluation of eight different probe designs (A-H) in parallel, using samples from two projects: XCE1205a (n=4 FOs) and XCC113 (n=6 F1s).

[0092] FIG. 27B is a schematic of various probe designs tested: the same probe length (125 bases) and density (20 bp spacing) against one strand (A), alternating strands (B) and both strands (C), lower density (D-E), longer probe length (F and G), or additional biotin moieties (H).

[0093] FIG. 27C is a graph showing probe sets of 125 bases in length designed against the top strand with 20 bp spacing and additional biotin moieties (H) had the highest capture efficiency (total mapped reads/total reads, y-axis), followed by 5′-bitoin modified probes (A), across project XCE1205a.

[0094] FIG. 27D is a graph showing probe sets of 125 bases in length designed against the top strand with 20 bp spacing and additional biotin moieties (H) had the highest capture efficiency (total mapped reads/total reads, y-axis), followed by 5′-bitoin modified probes (A), across project XCC113.

[0095] FIG. 27E is a graph showing the coverage depth (fraction of total bases on the y-axis versus depth of coverage on x-axis) across XCE1205a was also highest with probe designs A and H.

[0096] FIG. 27F is a graph showing the coverage depth (fraction of total bases on the y-axis versus depth of coverage on x-axis) across XCC113 was also highest with probe designs A and H.

[0097] FIG. 27G is a graph of coverage versus % GC content binned in 50 bp windows, fraction of bases covered (y-axis) are plotted across increasing % GC bins in XCE1205a. Size of data circle scaled to size of bin (number of loci that fit that % GC). Consistent with reduced overall coverage, lower probe density (D-E) performed worst across GC-rich regions while probes with more biotin moieties achieved the most consistent coverage.

[0098] FIG. 27H is a graph of coverage versus % GC content binned in 50 bp windows, fraction of bases covered (y-axis) are plotted across increasing % GC bins in XCC113. Size of data circle scaled to size of bin (number of loci that fit that % GC). Consistent with reduced overall coverage, lower probe density (D-E) performed worst across GC-rich regions while probes with more biotin moieties achieved the most consistent coverage.

[0099] FIG. 27I is a graph of read length distribution by test and quartile in XCE1205a. Read length (y-axis, bp) is shown per sample, with split distributions within samples across quartiles.

[0100] FIG. 27J is a graph of read length distribution by test and quartile in XCC113. Read length (y-axis, bp) is shown per sample, with split distributions within samples across quartiles.

[0101] FIG. 27K is a graph of read length composition in XCC113 by test using global deciles (top 10% and bottom 10% for all samples for each project), plotting the proportion that constitutes the globally calculated deciles for each sample.

[0102] FIG. 27L is a graph of read length composition in XCE1205a by test using global deciles (top 10% and bottom 10% for all samples for each project), plotting the proportion that constitutes the globally calculated deciles for each sample.

### DETAILED DESCRIPTION OF THE DISCLOSURE

[0103] The protocols disclosed herein address both of the input material and cost bottlenecks described above by using Tn5 to create long barcoded fragments in an unbiased manner that can be amplified and multiplexed for downstream library preparation. Development of a method to multiplex samples for long-read sequencing on the Oxford Nanopore. This method adapts a hyperactive version of Tn5 with three point mutations (E54K, M56A, and L372P) as previously described for fragmentation and barcoding of low-input genomic DNA. The construction of libraries for short-read sequencing on the Illumina platform using Tn5 was published previously. However, alternative reaction conditions had to be established for long-read sequencing of low-input material for the application disclosed herein. In particular, the use of a 5× TAPS-PEG buffer (5×PEG, 0.2 M TAPS, 1 M MgCl2) combined with a 37° C. or room temperature incubation for 15-20 minutes achieves longer fragment sizes (>2-3 kb) of barcoded material, suitable for pre-amplification of low-input material that can be multiplexed for probe-based target capture. The design of the oligos used to pre-load the Tn5 for barcoding have unique barcodes that are flanked by unique universal sequences (e.g., Illumina i5 and 7 sequences) so that a single primer set is used to amplify all samples while maintaining the unique barcode sequence. This process facilitates multiplexing of samples.

### Modulation Agents

[0104] As described herein, gene and/or associated protein expression has been implicated in various diseases, disorders, and conditions. As such, modulation of gene and protein expression can be used for treatment of such conditions. A modulation agent can modulate response, such as by inducing or inhibiting gene and/or protein expression signaling. Modulation can comprise modulating protein expression on cells, modulating the quantity of gene/protein expressing cells, or modulating the quality of gene/protein expressing cells.

[0105] Modulation agents can be any composition or method that modulates expression on cells. For example, a modulation agent can be an activator, an inhibitor, an agonist, or an antagonist. As another example, the modulation can be the result of gene editing.

[0106] A modulation agent can be an antibody (e.g., a monoclonal antibody). A modulating agent can be an agent that induces or inhibits progenitor cell differentiation into gene/protein expressing cells.

Signal Reduction, Elimination, or Inhibition by Small Molecule Inhibitors, shRNA, siRNA, or ASOS

[0107] As described herein, a modulation agent can be used for use in various therapies, such as to reduce/eliminate or enhance/increase expression signals. For example, a modulation agent can be a small molecule inhibitor, a short hairpin RNA (shRNA), or a short interfering RNA (siRNA). As another example, RNA (e.g., long noncoding RNA (lncRNA)) can be targeted with antisense oligonucleotides (ASOs) as a therapeutic. Processes for making ASOs targeted to RNAs are well known; see e.g., Zhou et al. 2016 Methods Mol Biol. 1402:199-213. Except as otherwise noted herein, therefore, the process of the present disclosure can be carried out in accordance with such processes.

### Inhibiting Agent

[0108] Inhibition of agents as described herein can be determined by standard pharmaceutical procedures in assays or cell cultures for determining the IC₅₀. The half maximal inhibitory concentration (IC₅₀) is a measure of the potency of a substance in inhibiting a specific biological or biochemical function. The IC₅₀ is a quantitative measure that indicates how much of a particular inhibitory substance (e.g., pharmaceutical agent or drug) is needed to inhibit, in vitro, a given biological process or biological component by 50%. The biological component could be an enzyme, cell, cell receptor, or microorganism, for example. IC₅₀ values are typically expressed as molar concentration. IC₅₀ is generally used as a measure of antagonist drug potency in pharmacological research. IC₅₀ is comparable to other measures of potency, such as EC₅₀ for excitatory drugs. EC₅₀ represents the dose or plasma concentration required for obtaining 50% of a maximum effect in vivo. IC₅₀ can be determined with functional assays or with competition binding assays.

### Chemical Agent

[0109] Examples of various sample preparation and assay agents are described herein. Some embodiments include a pharmaceutically acceptable salt, solvate, polymorph, tautomer, prodrug, analog, and/or stereoisomer thereof.

[0110] The formulas, analogs, and R groups can be optionally substituted or functionalized with one or more groups independently selected from the group consisting of hydroxyl; C₁₋₁₀alkyl hydroxyl; amine; C₁₋₁₀carboxylic acid; C₁₋₁₀carboxyl; straight chain or branched C₁₋₁₀alkyl, optionally containing unsaturation; a C₂₋₁₀cycloalkyl optionally containing unsaturation or one oxygen or nitrogen atom; straight chain or branched C₁₋₁₀alkyl amine; heterocyclyl; heterocyclic amine; and aryl comprising a phenyl; heteroaryl containing from 1 to 4 N, O, or S atoms; unsubstituted phenyl ring; substituted phenyl ring; unsubstituted heterocyclyl; and substituted heterocyclyl, wherein the unsubstituted phenyl ring or substituted phenyl ring can be optionally substituted with one or more groups independently selected from the group consisting of hydroxyl; C₁₋₁₀alkyl hydroxyl; amine; C₁₋₁₀carboxyl; C₁₋₁₀carboxylic acid; C₁₋₁₀carboxyl; straight chain or branched C₁₋₁₀alkyl, optionally containing unsaturation; straight chain or branched C₁₋₁₀alkyl amine, optionally containing unsaturation; a C₂₋₁₀cycloalkyl optionally containing unsaturation or one oxygen or nitrogen atom; straight chain or branched C₁₋₁₀alkyl amine; heterocyclyl; heterocyclic amine; aryl comprising a phenyl; and heteroaryl containing from 1 to 4 N, O, or S atoms; and the unsubstituted heterocyclyl or substituted heterocyclyl can be optionally substituted with one or more groups independently selected from the group consisting of hydroxyl; C₁₋₁₀alkyl hydroxyl; amine; C₁₋₁₀carboxylic acid; C₁₋₁₀carboxyl; straight chain or branched C₁₋₁₀alkyl, optionally containing unsaturation; straight chain or branched C₁₋₁₀alkyl amine, optionally containing unsaturation; a C₂₋₁₀cycloalkyl optionally containing unsaturation or one oxygen or nitrogen atom; heterocyclyl; straight chain or branched C₁₋₁₀alkyl amine; heterocyclic amine; and aryl comprising a phenyl; and heteroaryl containing from 1 to 4 N, O, or S atoms. Any of the above can be further optionally substituted.

[0111] The term “imine” or “imino”, as used herein, unless otherwise indicated, can include a functional group or chemical compound containing a carbon-nitrogen double bond. The expression “imino compound”, as used herein, unless otherwise indicated, refers to a compound that includes an “imine” or an “imino” group as defined herein. The “imine” or “imino” group can be optionally substituted.

[0112] The term “hydroxyl”, as used herein, unless otherwise indicated, can include —OH. The “hydroxyl” can be optionally substituted.

[0113] The terms “halogen” and “halo”, as used herein, unless otherwise indicated, include a chlorine, chloro, Cl; fluorine, fluoro, F; bromine, bromo, Br; or iodine, iodo, or I.

[0114] The term “acetamide”, as used herein, is an organic compound with the formula CH₃CONH₂. The “acetamide” can be optionally substituted.

[0115] The term “aryl”, as used herein, unless otherwise indicated, include a carbocyclic aromatic group. Examples of aryl groups include, but are not limited to, phenyl, benzyl, naphthyl, or anthracenyl. The “aryl” can be optionally substituted.

[0116] The terms “amine” and “amino”, as used herein, unless otherwise indicated, include a functional group that contains a nitrogen atom with a lone pair of electrons and wherein one or more hydrogen atoms have been replaced by a substituent such as, but not limited to, an alkyl group or an aryl group. The “amine” or “amino” group can be optionally substituted.

[0117] The term “alkyl”, as used herein, unless otherwise indicated, can include saturated monovalent hydrocarbon radicals having straight or branched moieties, such as but not limited to, methyl, ethyl, propyl, butyl, pentyl, hexyl, octyl groups, etc. Representative straight-chain lower alkyl groups include, but are not limited to, -methyl, -ethyl, -n-propyl, -n-butyl, -n-pentyl, -n-hexyl, -n-heptyl and -n-octyl; while branched lower alkyl groups include, but are not limited to, -isopropyl, -sec-butyl, -isobutyl, -tert-butyl, -isopentyl, 2-methylbutyl, 2-methylpentyl, 3-methylpentyl, 2,2-dimethylbutyl, 2,3-dimethylbutyl, 2,2-dimethylpentyl, 2,3-dimethylpentyl, 3,3-dimethylpentyl, 2,3,4-trimethylpentyl, 3-methylhexyl, 2,2-dimethylhexyl, 2,4-dimethylhexyl, 2,5-dimethylhexyl, 3,5-dimethylhexyl, 2,4-dimethylpentyl, 2-methylheptyl, 3-methylheptyl, unsaturated C₁₋₁₀ alkyls include, but are not limited to, -vinyl, -allyl, -1-butenyl, -2-butenyl, -isobutylenyl, -1-pentenyl, -2-pentenyl, -3-methyl-1-butenyl, -2-methyl-2-butenyl, -2,3-dimethyl-2-butenyl, 1-hexyl, 2-hexyl, 3-hexyl, -acetylenyl, -propynyl, -1-butynyl, -2-butynyl, -1-pentynyl, -2-pentynyl, or -3-methyl-1 butynyl. An alkyl can be saturated, partially saturated, or unsaturated. The “alkyl” can be optionally substituted.

[0118] The term “carboxyl”, as used herein, unless otherwise indicated, can include a functional group consisting of a carbon atom double bonded to an oxygen atom and single bonded to a hydroxyl group (—COOH). The “carboxyl” can be optionally substituted.

[0119] The term “carbonyl”, as used herein, unless otherwise indicated, can include a functional group consisting of a carbon atom double-bonded to an oxygen atom (C═O). The “carbonyl” can be optionally substituted.

[0120] The term “alkenyl”, as used herein, unless otherwise indicated, can include alkyl moieties having at least one carbon-carbon double bond wherein alkyl is as defined above and including E and Z isomers of said alkenyl moiety. An alkenyl can be partially saturated or unsaturated. The “alkenyl” can be optionally substituted.

[0121] The term “alkynyl”, as used herein, unless otherwise indicated, can include alkyl moieties having at least one carbon-carbon triple bond wherein alkyl is as defined above. An alkynyl can be partially saturated or unsaturated. The “alkynyl” can be optionally substituted.

[0122] The term “acyl”, as used herein, unless otherwise indicated, can include a functional group derived from an aliphatic carboxylic acid, by removal of the hydroxyl (—OH) group. The “acyl” can be optionally substituted.

[0123] The term “alkoxyl”, as used herein, unless otherwise indicated, can include O-alkyl groups wherein alkyl is as defined above and O represents oxygen. Representative alkoxyl groups include, but are not limited to, —O-methyl, —O-ethyl, —O-n-propyl, —O-n-butyl, —O-n-pentyl, —O-n-hexyl, —O-n-heptyl, —O-n-octyl, —O-isopropyl, —O-sec-butyl, —O-isobutyl, —O-tert-butyl, —O-isopentyl, —O-2-methylbutyl, —O-2-methylpentyl, —O-3-methylpentyl, —O-2,2-dimethylbutyl, —O-2,3-dimethylbutyl, —O-2,2-dimethylpentyl, —O-2,3-dimethylpentyl, —O-3,3-dimethylpentyl, —O-2,3,4-trimethylpentyl, —O-3-methylhexyl, —O-2,2-dimethylhexyl, —O-2,4-dimethylhexyl, —O-2,5-dimethylhexyl, —O-3,5-dimethylhexyl, —O-2,4dimethylpentyl, —O-2-methylheptyl, —O-3-methylheptyl, —O-vinyl, —O-allyl, —O-1-butenyl, —O-2-butenyl, —O— isobutylenyl, —O-1-pentenyl, —O-2-pentenyl, —O-3-methyl-1-butenyl, —O-2-methyl-2-butenyl, —O-2,3-dimethyl-2-butenyl, —O-1-hexyl, —O-2-hexyl, —O-3-hexyl, —O-acetylenyl, —O-propynyl, —O-1-butynyl, —O-2-butynyl, —O-1-pentynyl, —O-2-pentynyl and —O-3-methyl-1-butynyl, —O— cyclopropyl, —O-cyclobutyl, —O-cyclopentyl, —O-cyclohexyl, —O-cycloheptyl, —O-cyclooctyl, —O— cyclononyl and —O-cyclodecyl, —O—CH₂-cyclopropyl, —O—CH₂-cyclobutyl, —O—CH₂-cyclopentyl, —O-CH₂-cyclohexyl, —O—CH₂-cycloheptyl, —O—CH₂-cyclooctyl, —O— CH₂-cyclononyl, —O—CH₂-cyclodecyl, —O—(CH₂)₂-cyclopropyl, —O—(CH₂)₂-cyclobutyl, —O—(CH₂)₂-cyclopentyl, —O—(CH₂)₂-cyclohexyl, —O—(CH₂)₂-cycloheptyl, —O—(CH₂)₂-cyclooctyl, —O—(CH₂)₂-cyclononyl, or —O—(CH₂)₂-cyclodecyl. An alkoxyl can be saturated, partially saturated, or unsaturated. The “alkoxyl” can be optionally substituted.

[0124] The term “cycloalkyl”, as used herein, unless otherwise indicated, can include an aromatic, a non-aromatic, saturated, partially saturated, or unsaturated, monocyclic or fused, spiro or unfused bicyclic or tricyclic hydrocarbon referred to herein containing a total of from 1 to 10 carbon atoms (e.g., 1 or 2 carbon atoms if there are other heteroatoms in the ring), preferably 3 to 8 ring carbon atoms. Examples of cycloalkyls include, but are not limited to, C₃₋₁₀ cycloalkyl groups include, but are not limited to, -cyclopropyl, -cyclobutyl, -cyclopentyl, -cyclopentadienyl, -cyclohexyl, -cyclohexenyl, -1,3-cyclohexadienyl, -1,4-cyclohexadienyl, -cycloheptyl, -1,3-cycloheptadienyl, -1,3,5-cycloheptatrienyl, -cyclooctyl, and -cyclooctadienyl. The term “cycloalkyl” also can include -lower alkyl-cycloalkyl, wherein lower alkyl and cycloalkyl are as defined herein. Examples of -lower alkyl-cycloalkyl groups include, but are not limited to, —CH₂-cyclopropyl, —CH₂-cyclobutyl, —CH₂-cyclopentyl, —CH₂-cyclopentadienyl, —CH₂-cyclohexyl, —CH₂-cycloheptyl, or —CH₂-cyclooctyl. The “cycloalkyl” can be optionally substituted. A “cycloheteroalkyl”, as used herein, unless otherwise indicated, can include any of the above with a carbon substituted with a heteroatom (e.g., O, S, N).

[0125] The term “heterocyclic” or “heteroaryl”, as used herein, unless otherwise indicated, can include an aromatic or non-aromatic cycloalkyl in which one to four of the ring carbon atoms are independently replaced with a heteroatom from the group consisting of O, S, and N. Representative examples of a heterocycle include, but are not limited to, benzofuranyl, benzothiophene, indolyl, benzopyrazolyl, coumarinyl, isoquinolinyl, pyrrolyl, pyrrolidinyl, thiophenyl, furanyl, thiazolyl, imidazolyl, pyrazolyl, triazolyl, quinolinyl, pyrimidinyl, pyridinyl, pyridonyl, pyrazinyl, pyridazinyl, isothiazolyl, isoxazolyl, (1,4)-dioxane, (1,3)-dioxolane, 4,5-dihydro-1H-imidazolyl, or tetrazolyl. Heterocycles can be substituted or unsubstituted. Heterocycles can also be bonded at any ring atom (i.e., at any carbon atom or heteroatom of the heterocyclic ring). A heterocyclic can be saturated, partially saturated, or unsaturated. The “heterocyclic” can be optionally substituted.

[0126] The term “indole”, as used herein, is an aromatic heterocyclic organic compound with formula C₈H₇N. It has a bicyclic structure, consisting of a six-membered benzene ring fused to a five-membered nitrogen-containing pyrrole ring. The “indole” can be optionally substituted.

[0127] The term “cyano”, as used herein, unless otherwise indicated, can include a —CN group. The “cyano” can be optionally substituted.

[0128] The term “alcohol”, as used herein, unless otherwise indicated, can include a compound in which the hydroxyl functional group (—OH) is bound to a carbon atom. In particular, this carbon center should be saturated, having single bonds to three other atoms. The “alcohol” can be optionally substituted.

[0129] The term “solvate” is intended to mean a solvate form of a specified compound that retains the effectiveness of such compound. Examples of solvates include compounds of the invention in combination with, for example, water, isopropanol, ethanol, methanol, dimethylsulfoxide (DMSO), ethyl acetate, acetic acid, or ethanolamine.

[0130] The term “mmol”, as used herein, is intended to mean millimole. The term “equiv”, as used herein, is intended to mean equivalent. The term “mL”, as used herein, is intended to mean milliliter. The term “g”, as used herein, is intended to mean gram. The term “kg”, as used herein, is intended to mean kilogram. The term “μg”, as used herein, is intended to mean micrograms. The term “h”, as used herein, is intended to mean hour. The term “min”, as used herein, is intended to mean minute. The term “M”, as used herein, is intended to mean molar. The term “μL”, as used herein, is intended to mean microliter. The term “μM”, as used herein, is intended to mean micromolar. The term “nM”, as used herein, is intended to mean nanomolar. The term “N”, as used herein, is intended to mean normal. The term “amu”, as used herein, is intended to mean atomic mass unit. The term “° C.”, as used herein, is intended to mean degree Celsius. The term “wt/wt”, as used herein, is intended to mean weight/weight. The term “v/v”, as used herein, is intended to mean volume/volume. The term “MS”, as used herein, is intended to mean mass spectroscopy. The term “HPLC”, as used herein, is intended to mean high performance liquid chromatograph. The term “RT”, as used herein, is intended to mean room temperature. The term “e.g.”, as used herein, is intended to mean example. The term “N/A”, as used herein, is intended to mean not tested.

[0131] As used herein, the expression “pharmaceutically acceptable salt” refers to pharmaceutically acceptable organic or inorganic salts of a compound of the invention. Preferred salts include, but are not limited, to sulfate, citrate, acetate, oxalate, chloride, bromide, iodide, nitrate, bisulfate, phosphate, acid phosphate, isonicotinate, lactate, salicylate, acid citrate, tartrate, oleate, tannate, pantothenate, bitartrate, ascorbate, succinate, maleate, gentisinate, fumarate, gluconate, glucaronate, saccharate, formate, benzoate, glutamate, methanesulfonate, ethanesulfonate, benzenesulfonate, p-toluenesulfonate, or pamoate (i.e., 1,1′-methylene-bis-(2-hydroxy-3-naphthoate)) salts. A pharmaceutically acceptable salt may involve the inclusion of another molecule such as an acetate ion, a succinate ion, or another counterion. The counterion may be any organic or inorganic moiety that stabilizes the charge on the parent compound. Furthermore, a pharmaceutically acceptable salt may have more than one charged atom in its structure. In instances where multiple charged atoms are part of the pharmaceutically acceptable salt, the pharmaceutically acceptable salt can have multiple counterions. Hence, a pharmaceutically acceptable salt can have one or more charged atoms and/or one or more counterion. As used herein, the expression “pharmaceutically acceptable solvate” refers to an association of one or more solvent molecules and a compound of the invention. Examples of solvents that form pharmaceutically acceptable solvates include, but are not limited to, water, isopropanol, ethanol, methanol, DMSO, ethyl acetate, acetic acid, and ethanolamine. As used herein, the expression “pharmaceutically acceptable hydrate” refers to a compound of the invention, or a salt thereof, that further can include a stoichiometric or non-stoichiometric amount of water bound by non-covalent intermolecular forces.

### Molecular Engineering

[0132] The following definitions and methods are provided to better define the present invention and to guide those of ordinary skill in the art in the practice of the present invention. Unless otherwise noted, terms are to be understood according to conventional usage by those of ordinary skill in the relevant art.

[0133] The term “transfection,” as used herein, refers to the process of introducing nucleic acids into cells by non-viral methods. The term “transduction,” as used herein, refers to the process whereby foreign DNA is introduced into another cell via a viral vector.

[0134] The terms “heterologous DNA sequence”, “exogenous DNA segment”, or “heterologous nucleic acid”, “transgene”, “exogenous polynucleotide” as used herein, each refers to a sequence that originates from a source foreign (e.g., non-native) to the particular host cell or, if from the same source, is modified from its original form. Thus, a heterologous gene in a host cell includes a gene that is endogenous to the particular host cell but has been modified through, for example, the use of DNA shuffling or cloning. The terms also include non-naturally occurring multiple copies of a naturally occurring DNA sequence. Thus, the terms refer to a DNA segment that is foreign or heterologous to the cell, or homologous to the cell but in a position within the host cell nucleic acid in which the element is not ordinarily found. Exogenous DNA segments are expressed to yield exogenous polypeptides. A “homologous” DNA sequence is a DNA sequence that is naturally associated with a host cell into which it is introduced.

[0135] Sequences described herein can also be the reverse, the complement, or the reverse complement of the nucleotide sequences described herein. The RNA goes in the reverse direction compared to the DNA, but its base pairs still match (e.g., G to C). The reverse complementary RNA for a positive strand DNA sequence will be identical to the corresponding negative strand DNA sequence. Reverse complement converts a DNA sequence into its reverse, complement, or reverse-complement counterpart.

| Base | Name | Bases Represented | Complementary Base |
|---|---|---|---|
| A | Adenine | A | T |
| T | Thymidine | T | A |
| U | Uridine(RNA only) | U | A |
| G | Guanidine | G | C |
| C | Cytidine | C | G |
| Y | pYrimidine | C T | R |
| R | purine | A G | Y |
| S | Strong(3Hbonds) | G C | S* |
| W | Weak(2Hbonds) | A T | W* |
| K | Keto | T/U G | M |
| M | aMino | A C | K |
| B | not A | C G T | V |
| D | not C | A G T | H |
| H | not G | A C T | D |
| V | not T/U | A C G | B |
| N | Unknown | A C G T | N |

[0136] Complementarity is a property shared between two nucleic acid sequences (e.g., RNA, DNA), such that when they are aligned antiparallel to each other, the nucleotide bases at each position will be complementary. Two bases are complementary if they form Watson-Crick base pairs.

[0137] Expression vector, expression construct, plasmid, or recombinant DNA construct is generally understood to refer to a nucleic acid that has been generated via human intervention, including by recombinant means or direct chemical synthesis, with a series of specified nucleic acid elements that permit transcription or translation of a particular nucleic acid in, for example, a host cell. The expression vector can be part of a plasmid, virus, or nucleic acid fragment. Typically, the expression vector can include a nucleic acid to be transcribed operably linked to a promoter.

[0138] An “expression vector”, otherwise known as an “expression construct”, is generally a plasmid or virus designed for gene expression in cells. The vector is used to introduce a specific gene into a target cell, and can commandeer the cell's mechanism for protein synthesis to produce the protein encoded by the gene. Expression vectors are the basic tools in biotechnology for the production of proteins. The vector is engineered to contain regulatory sequences that act as enhancer and/or promoter regions and lead to efficient transcription of the gene carried on the expression vector. The goal of a well-designed expression vector is the efficient production of protein, and this may be achieved by the production of significant amount of stable messenger RNA, which can then be translated into protein. The expression of a protein may be tightly controlled, and the protein is only produced in significant quantity when necessary through the use of an inducer, in some systems however the protein may be expressed constitutively. As described herein, Escherichia coli is used as the host for protein production, but other cell types may also be used.

[0139] In molecular biology, an “inducer” is a molecule that regulates gene expression. An inducer can function in two ways, such as:
[0140] (i) By disabling repressors. The gene is expressed because an inducer binds to the repressor. The binding of the inducer to the repressor prevents the repressor from binding to the operator. RNA polymerase can then begin to transcribe operon genes. An operon is a cluster of genes that are transcribed together to give a single messenger RNA (mRNA) molecule, which therefore encodes multiple proteins.
[0141] (ii) By binding to activators. Activators generally bind poorly to activator DNA sequences unless an inducer is present. An activator binds to an inducer and the complex binds to the activation sequence and activates target gene. Removing the inducer stops transcription. Because a small inducer molecule is required, the increased expression of the target gene is called induction.

[0142] Repressor proteins bind to the DNA strand and prevent RNA polymerase from being able to attach to the DNA and synthesize mRNA. Inducers bind to repressors, causing them to change shape and preventing them from binding to DNA. Therefore, they allow transcription, and thus gene expression, to take place.

[0143] For a gene to be expressed, its DNA sequence (or polynucleotide sequence) must be copied (in a process known as transcription) to make a smaller, mobile molecule called messenger RNA (mRNA), which carries the instructions for making a protein to the site where the protein is manufactured (in a process known as translation). Many different types of proteins can affect the level of gene expression by promoting or preventing transcription. In prokaryotes (such as bacteria), these proteins often act on a portion of DNA known as the operator at the beginning of the gene. The promoter is where RNA polymerase, the enzyme that copies the genetic sequence and synthesizes the mRNA, attaches to the DNA strand.

[0144] Some genes are modulated by activators, which have the opposite effect on gene expression as repressors. Inducers can also bind to activator proteins, allowing them to bind to the operator DNA where they promote RNA transcription. Ligands that bind to deactivate activator proteins are not, in the technical sense, classified as inducers, since they have the effect of preventing transcription.

[0145] A “promoter” is generally understood as a nucleic acid control sequence that directs transcription of a nucleic acid. An inducible promoter is generally understood as a promoter that mediates transcription of an operably linked gene in response to a particular stimulus. A promoter can include necessary nucleic acid sequences near the start site of transcription, such as, in the case of a polymerase II type promoter, a TATA element. A promoter can optionally include distal enhancer or repressor elements, which can be located as much as several thousand base pairs from the start site of transcription.

[0146] A “ribosome binding site”, or “ribosomal binding site (RBS)”, refers to a sequence of nucleotides upstream of the start codon of an mRNA transcript that is responsible for the recruitment of a ribosome during the initiation of translation. Generally, RBS refers to bacterial sequences, although internal ribosome entry sites (IRES) have been described in mRNAs of eukaryotic cells or viruses that infect eukaryotes. Ribosome recruitment in eukaryotes is generally mediated by the 5′ cap present on eukaryotic mRNAs.

[0147] A ribosomal skipping sequence (e.g., 2A sequence such as furin-GSG-T2A) can be used in a construct to prevent covalently linking translated amino acid sequences.

[0148] A “transcribable nucleic acid molecule” as used herein refers to any nucleic acid molecule capable of being transcribed into an RNA molecule. Methods are known for introducing constructs into a cell in such a manner that the transcribable nucleic acid molecule is transcribed into a functional mRNA molecule that is translated and therefore expressed as a protein product. Constructs may also be constructed to be capable of expressing antisense RNA molecules, in order to inhibit translation of a specific RNA molecule of interest. For the practice of the present disclosure, conventional compositions and methods for preparing and using constructs and host cells are well known to one skilled in the art (see e.g., Sambrook and Russel (2006) Condensed Protocols from Molecular Cloning: A Laboratory Manual, Cold Spring Harbor Laboratory Press, ISBN-10: 0879697717; Ausubel et al. (2002) Short Protocols in Molecular Biology, 5th ed., Current Protocols, ISBN-10: 0471250929; Sambrook and Russel (2001) Molecular Cloning: A Laboratory Manual, 3d ed., Cold Spring Harbor Laboratory Press, ISBN-10: 0879695773; Elhai, J. and Wolk, C. P. 1988. Methods in Enzymology 167, 747-754).

[0149] The “transcription start site” or “initiation site” is the position surrounding the first nucleotide that is part of the transcribed sequence, which is also defined as position+1. With respect to this site all other sequences of the gene and its controlling regions can be numbered. Downstream sequences (i.e., further protein encoding sequences in the 3′ direction) can be denominated positive, while upstream sequences (mostly of the controlling regions in the 5′ direction) are denominated negative.

[0150] “Operably-linked” or “functionally linked” refers preferably to the association of nucleic acid sequences on a single nucleic acid fragment so that the function of one is affected by the other. For example, a regulatory DNA sequence is said to be “operably linked to” or “associated with” a DNA sequence that codes for an RNA or a polypeptide if the two sequences are situated such that the regulatory DNA sequence affects expression of the coding DNA sequence (i.e., that the coding sequence or functional RNA is under the transcriptional control of the promoter). Coding sequences can be operably-linked to regulatory sequences in sense or antisense orientation. The two nucleic acid molecules may be part of a single contiguous nucleic acid molecule and may be adjacent. For example, a promoter is operably linked to a gene of interest if the promoter regulates or mediates transcription of the gene of interest in a cell.

[0151] A “construct” is generally understood as any recombinant nucleic acid molecule such as a plasmid, cosmid, virus, autonomously replicating nucleic acid molecule, phage, or linear or circular single-stranded or double-stranded DNA or RNA nucleic acid molecule, derived from any source, capable of genomic integration or autonomous replication, comprising a nucleic acid molecule where one or more nucleic acid molecule has been operably linked.

[0152] A construct of the present disclosure can contain a promoter operably linked to a transcribable nucleic acid molecule operably linked to a 3′ transcription termination nucleic acid molecule. In addition, constructs can include but are not limited to additional regulatory nucleic acid molecules from, e.g., the 3-untranslated region (3′ UTR). Constructs can include but are not limited to the 5′ untranslated regions (5′ UTR) of an mRNA nucleic acid molecule which can play an important role in translation initiation and can also be a genetic component in an expression construct. These additional upstream and downstream regulatory nucleic acid molecules may be derived from a source that is native or heterologous with respect to the other elements present on the promoter construct.

[0153] The term “transformation” refers to the transfer of a nucleic acid fragment into the genome of a host cell, resulting in genetically stable inheritance. Host cells containing the transformed nucleic acid fragments are referred to as “transgenic” cells, and organisms comprising transgenic cells are referred to as “transgenic organisms”.

[0154] “Transformed,” “transgenic,” and “recombinant” refer to a host cell or organism such as a bacterium, cyanobacterium, animal, or a plant into which a heterologous nucleic acid molecule has been introduced. The nucleic acid molecule can be stably integrated into the genome as generally known in the art and disclosed (Sambrook 1989; Innis 1995; Gelfand 1995; Innis & Gelfand 1999). Known methods of PCR include, but are not limited to, methods using self-replicating primers, paired primers, nested primers, single specific primers, degenerate primers, gene-specific primers, vector-specific primers, partially mismatched primers, and the like. The term “untransformed” refers to normal cells that have not been through the transformation process.

[0155] “Wild-type” refers to a virus or organism found in nature without any known mutation.

[0156] Design, generation, and testing of the variant nucleotides, and their encoded polypeptides, having the above-required percent identities and retaining a required activity of the expressed protein is within the skill of the art. For example, directed evolution and rapid isolation of mutants can be according to methods described in references including, but not limited to, Link et al. (2007) Nature Reviews 5(9), 680-688; Sanger et al. (1991) Gene 97(1), 119-123; Ghadessy et al. (2001) Proc Natl Acad Sci USA 98(8) 4552-4557. Thus, one skilled in the art could generate a large number of nucleotide and/or polypeptide variants having, for example, at least 95-99% identity to the reference sequence described herein and screen such for desired phenotypes according to methods routine in the art.

[0157] Nucleotide and/or amino acid sequence identity percent (%) is understood as the percentage of nucleotide or amino acid residues that are identical with nucleotide or amino acid residues in a candidate sequence in comparison to a reference sequence when the two sequences are aligned. To determine percent identity, sequences are aligned and if necessary, gaps are introduced to achieve the maximum percent sequence identity. Sequence alignment procedures to determine percent identity are well known to those of skill in the art. Often publicly available computer software such as BLAST, BLAST2, ALIGN2, or Megalign (DNASTAR) software is used to align sequences. Those skilled in the art can determine appropriate parameters for measuring alignment, including any algorithms needed to achieve maximal alignment over the full-length of the sequences being compared. When sequences are aligned, the percent sequence identity of a given sequence A to, with, or against a given sequence B (which can alternatively be phrased as a given sequence A that has or comprises a certain percent sequence identity to, with, or against a given sequence B) can be calculated as: percent sequence identity=X/Y100, where X is the number of residues scored as identical matches by the sequence alignment program's or algorithm's alignment of A and B and Y is the total number of residues in B. If the length of sequence A is not equal to the length of sequence B, the percent sequence identity of A to B will not equal the percent sequence identity of B to A. For example, the percent identity can be at least 80% or about 80%, about 81%, about 82%, about 83%, about 84%, about 85%, about 86%, about 87%, about 88%, about 89%, about 90%, about 91%, about 92%, about 93%, about 94%, about 95%, about 96%, about 97%, about 98%, about 99%, or about 100%.

[0158] Substitution refers to the replacement of one amino acid with another amino acid in a protein or the replacement of one nucleotide with another in DNA or RNA. Insertion refers to the insertion of one or more amino acids in a protein or the insertion of one or more nucleotides with another in DNA or RNA. Deletion refers to the deletion of one or more amino acids in a protein or the deletion of one or more nucleotides with another in DNA or RNA. Generally, substitutions, insertions, or deletions can be made at any position so long as the required activity is retained.

[0159] “Point mutation” refers to when a single base pair is altered. A point mutation or substitution is a genetic mutation where a single nucleotide base is changed, inserted, or deleted from a DNA or RNA sequence of an organism's genome. Point mutations have a variety of effects on the downstream protein product-consequences that are moderately predictable based upon the specifics of the mutation. These consequences can range from no effect (e.g., synonymous mutations) to deleterious effects (e.g., frameshift mutations), with regard to protein production, composition, and function. Point mutations can have one of three effects. First, the base substitution can be a silent mutation where the altered codon corresponds to the same amino acid. Second, the base substitution can be a missense mutation where the altered codon corresponds to a different amino acid. Or third, the base substitution can be a nonsense mutation where the altered codon corresponds to a stop signal. Silent mutations result in a new codon (a triplet nucleotide sequence in RNA) that codes for the same amino acid as the wild type codon in that position. In some silent mutations the codon codes for a different amino acid that happens to have the same properties as the amino acid produced by the wild type codon. Missense mutations involve substitutions that result in functionally different amino acids; these can lead to alteration or loss of protein function. Nonsense mutations, which are a severe type of base substitution, result in a stop codon in a position where there was not one before, which causes the premature termination of protein synthesis and can result in a complete loss of function in the finished protein.

[0160] Generally, conservative substitutions can be made at any position so long as the required activity is retained. So-called conservative exchanges can be carried out in which the amino acid which is replaced has a similar property as the original amino acid, for example, the exchange of Glu by Asp, Gln by Asn, Val by IIe, Leu by IIe, and Ser by Thr. For example, amino acids with similar properties can be Aliphatic amino acids (e.g., Glycine, Alanine, Valine, Leucine, Isoleucine); hydroxyl or sulfur/selenium-containing amino acids (e.g., Serine, Cysteine, Selenocysteine, Threonine, Methionine); Cyclic amino acids (e.g., Proline); Aromatic amino acids (e.g., Phenylalanine, Tyrosine, Tryptophan); Basic amino acids (e.g., Histidine, Lysine, Arginine); or Acidic and their Amide (e.g., Aspartate, Glutamate, Asparagine, Glutamine). Deletion is the replacement of an amino acid by a direct bond. Positions for deletions include the termini of a polypeptide and linkages between individual protein domains. Insertions are introductions of amino acids into the polypeptide chain, a direct bond formally being replaced by one or more amino acids. An amino acid sequence can be modulated with the help of art-known computer simulation programs that can produce a polypeptide with, for example, improved activity or altered regulation. On the basis of these artificially generated polypeptide sequences, a corresponding nucleic acid molecule coding for such a modulated polypeptide can be synthesized in-vitro using the specific codon-usage of the desired host cell.

[0161] “Highly stringent hybridization conditions” are defined as hybridization at 65° C. in a 6×SSC buffer (i.e., 0.9 M sodium chloride and 0.09 M sodium citrate). Given these conditions, a determination can be made as to whether a given set of sequences will hybridize by calculating the melting temperature (Tₘ) of a DNA duplex between the two sequences. If a particular duplex has a melting temperature lower than 65° C. in the salt conditions of a 6×SSC, then the two sequences will not hybridize. On the other hand, if the melting temperature is above 65° C. in the same salt conditions, then the sequences will hybridize. In general, the melting temperature for any hybridized DNA:DNA sequence can be determined using the following formula: Tₘ=81.5° C.+16.6(log₁₀[Na⁺])+0.41(fraction G/C content)−0.63(% formamide)−(600/I). Furthermore, the Tₘ of a DNA:DNA hybrid is decreased by 1-1.5° C. for every 1% decrease in nucleotide identity (see e.g., Sambrook and Russel, 2006).

[0162] Host cells can be transformed using a variety of standard techniques known to the art (see e.g., Sambrook and Russel (2006) Condensed Protocols from Molecular Cloning: A Laboratory Manual, Cold Spring Harbor Laboratory Press, ISBN-10: 0879697717; Ausubel et al. (2002) Short Protocols in Molecular Biology, 5th ed., Current Protocols, ISBN-10: 0471250929; Sambrook and Russel (2001) Molecular Cloning: A Laboratory Manual, 3d ed., Cold Spring Harbor Laboratory Press, ISBN-10: 0879695773; Elhai, J. and Wolk, C. P. 1988. Methods in Enzymology 167, 747-754). Such techniques include, but are not limited to, viral infection, calcium phosphate transfection, liposome-mediated transfection, microprojectile-mediated delivery, receptor-mediated uptake, cell fusion, electroporation, and the like. The transformed cells can be selected and propagated to provide recombinant host cells that comprise the expression vector stably integrated in the host cell geno

| | |
|---|---|
| Side Chain Characteristic | Amino Acid |

Conservative Substitutions I

| | |
|---|---|
| Aliphatic Non-polar | G A P I L V |
| Polar-uncharged | C S T M N Q |
| Polar-charged | D E K R |
| Aromatic | H F W Y |
| Other | N Q D E |

Conservative Substitutions II

| | |
|---|---|
| Non-polar (hydrophobic) | |
| A. Aliphatic: | A L I V P |
| B. Aromatic: | F W |
| C. Sulfur-containing: | M |
| D. Borderline: | G |
| Uncharged-polar | |
| A. Hydroxyl: | S T Y |
| B. Amides: | N Q |
| C. Sulfhydryl: | C |
| D. Borderline: | G |
| Positively Charged | K R H |
| (Basic): | |
| Negatively Charged | D E |
| (Acidic): | |

Conservative Substitutions III

| | Exemplary |
|---|---|
| Original Residue | Substitution |
| Ala (A) | Val, Leu, Ile |
| Arg (R) | Lys, Gln, Asn |
| Asn (N) | Gln, His, Lys, Arg |
| Asp (D) | Glu |
| Cys (C) | Ser |
| Gln (Q) | Asn |
| Glu (E) | Asp |
| His (H) | Asn, Gln, Lys, Arg |
| Ile (I) | Leu, Val, Met, Ala, |
| | Phe, |
| | Ile, Val, Met, Ala, |
| Leu (L) | Phe |
| Lys (K) | Arg, Gln, Asn |
| Met(M) | Leu, Phe, Ile |
| Phe (F) | Leu, Val, Ile, Ala |
| Pro (P) | Gly |
| Ser (S) | Thr |
| Thr (T) | Ser |
| Trp(W) | Tyr, Phe |
| Tyr (Y) | Trp, Phe, Tur, Ser |
| Val (V) | Ile, Leu, Met, Phe, |
| | Ala |

[0163] Exemplary nucleic acids that may be introduced to a host cell include, for example, DNA sequences or genes from another species, or even genes or sequences which originate with or are present in the same species, but are incorporated into recipient cells by genetic engineering methods. The term “exogenous” is also intended to refer to genes that are not normally present in the cell being transformed, or perhaps simply not present in the form, structure, etc., as found in the transforming DNA segment or gene, or genes which are normally present and that one desires to express in a manner that differs from the natural expression pattern, e.g., to over-express. Thus, the term “exogenous” gene or DNA is intended to refer to any gene or DNA segment that is introduced into a recipient cell, regardless of whether a similar gene may already be present in such a cell. The type of DNA included in the exogenous DNA can include DNA that is already present in the cell, DNA from another individual of the same type of organism, DNA from a different organism, or a DNA generated externally, such as a DNA sequence containing an antisense message of a gene, or a DNA sequence encoding a synthetic or modified version of a gene.

[0164] Host strains developed according to the approaches described herein can be evaluated by a number of means known in the art (see e.g., Studier (2005) Protein Expr Purif. 41(1), 207-234; Gellissen, ed. (2005) Production of Recombinant Proteins: Novel Microbial and Eukaryotic Expression Systems, Wiley-VCH, ISBN-10: 3527310363; Baneyx (2004) Protein Expression Technologies, Taylor & Francis, ISBN-10: 0954523253).

[0165] Methods of down-regulation or silencing genes are known in the art. For example, expressed protein activity can be down-regulated or eliminated using antisense oligonucleotides (ASOs), protein aptamers, nucleotide aptamers, and RNA interference (RNAi) (e.g., small interfering RNAs (siRNA), short hairpin RNA (shRNA), single guide RNA (sgRNA), and micro RNAs (miRNA) (see e.g., Rinaldi and Wood (2017) Nature Reviews Neurology 14, describing ASO therapies; Fanning and Symonds (2006) Handb Exp Pharmacol. 173, 289-303G, describing hammerhead ribozymes and small hairpin RNA; Helene, et al. (1992) Ann. N.Y. Acad. Sci. 660, 27-36; Maher (1992) Bioassays 14(12): 807-15, describing targeting deoxyribonucleotide sequences; Lee et al. (2006) Curr Opin Chem Biol. 10, 1-8, describing aptamers; Reynolds et al. (2004) Nature Biotechnology 22(3), 326-330, describing RNAi; Pushparaj and Melendez (2006) Clinical and Experimental Pharmacology and Physiology 33(5-6), 504-510, describing RNAi; Dillon et al. (2005) Annual Review of Physiology 67, 147-173, describing RNAi; Dykxhoorn and Lieberman (2005) Annual Review of Medicine 56, 401-423, describing RNAi). RNAi molecules are commercially available from a variety of sources (e.g., Ambion, TX; Sigma Aldrich, MO; Invitrogen). Several siRNA molecule design programs using a variety of algorithms are known to the art (see e.g., Cenix algorithm, Ambion; BLOCK-iT™ RNAi Designer, Invitrogen; siRNA Whitehead Institute Design Tools, Bioinformatics & Research Computing). Traits influential in defining optimal siRNA sequences include G/C content at the termini of the siRNAs, Tₘ of specific internal domains of the siRNA, siRNA length, position of the target sequence within the CDS (coding region), and nucleotide content of the 3′ overhangs.

### Genome Editing

[0166] As described herein, gene and/or protein expression signals can be modulated (e.g., reduced, eliminated, or enhanced) using genome editing.

[0167] As described herein, activity, signals, expression, or function can be modulated (e.g., reduced, eliminated, or enhanced) using genome editing (e.g., upregulate, downregulate, overexpress, underexpress, express (e.g., transgenic expression), knock in, knock out, knockdown).

[0168] Processes for genome editing are well known; see e.g., Aldi 2018 Nature Communications 9(1911). Except as otherwise noted herein, therefore, the process of the present disclosure can be carried out in accordance with such processes.

[0169] For example, genome editing can comprise CRISPR/Cas9, CRISPR-Cpf1, TALEN, or ZNFs. Adequate blockage of gene/protein expression/signaling by genome editing can result in protection from autoimmune or inflammatory diseases.

[0170] As an example, clustered regularly interspaced short palindromic repeats (CRISPR)/CRISPR-associated (Cas) systems are a new class of genome-editing tools that target desired genomic sites in mammalian cells. Recently published type II CRISPR/Cas systems use Cas9 nuclease that is targeted to a genomic site by complexing with a synthetic guide RNA that hybridizes to a 20-nucleotide DNA sequence and immediately preceding an NGG motif recognized by Cas9 (thus, a (N)₂₀NGG target DNA sequence). This results in a double-strand break three nucleotides upstream of the NGG motif. The double strand break instigates either non-homologous end-joining, which is error-prone and conducive to frameshift mutations that knock out gene alleles, or homology-directed repair, which can be exploited with the use of an exogenously introduced double-strand or single-strand DNA repair template to knock in or correct a mutation in the genome. Thus, genomic editing, for example, using CRISPR/Cas systems could be useful tools for therapeutic applications to target cells by the removal or addition of signals (e.g., activate (e.g., CRISPRa), upregulate, overexpress, downregulate).

[0171] For example, the methods as described herein can comprise a method for altering a target polynucleotide sequence in a cell comprising contacting the polynucleotide sequence with a clustered regularly interspaced short palindromic repeats-associated (Cas) protein.

### Gene Therapy and Genome Editing

[0172] Gene therapies can include inserting a functional gene with a viral vector. Gene therapies are rapidly advancing.

[0173] There has recently been an improved landscape for gene therapies. For example, in the first quarter of 2019, there were 372 ongoing gene therapy clinical trials (Alliance for Regenerative Medicine, 5/9/19).

[0174] Any vector known in the art can be used. For example, the vector can be a viral vector selected from retrovirus, lentivirus, herpes, adenovirus, adeno-associated virus (AAV), rabies, Ebola, lentivirus, or hybrids thereof.

### Gene Therapy Strategies.

| | Strategy |
|---|---|
| Viral Vectors | |
| Retroviruses | Retroviruses are RNA viruses transcribing |
| | their single-stranded |
| | genome into a double-stranded DNA copy, |
| | which can integrate into host chromosome |
| Adenoviruses (Ad) | Ad can transfect a variety of quiescent and |
| | proliferating |
| | cell types from various species and can |
| | mediate |
| | robust gene expression |
| Adeno-associated | Recombinant AAV vectors contain no viral |
| Viruses (AAV) | DNA and can carry ~4.7 kb of foreign |
| | transgenic material. They |
| | are replication defective and can replicate |
| | only while |
| | coinfecting with a helper virus |
| Non-viral vectors | |
| plasmid DNA | pDNA has many desired characteristics as a |
| (pDNA) | gene |
| | therapy vector; there are no limits on the size |
| | or genetic |
| | constitution of DNA, it is relatively |
| | inexpensive to supply, |
| | and unlike viruses, antibodies are not |
| | generated |
| | against DNA in normal individuals |
| RNAi | RNAi is a powerful tool for gene specific |
| | silencing that |
| | could be useful as an enzyme reduction |
| | therapy or |
| | means to promote read-through of a |
| | premature stop |
| | codon |

[0175] Gene therapy can allow for the constant delivery of the enzyme directly to target organs and eliminates the need for weekly infusions. Also, correction of a few cells could lead to the enzyme being secreted into the circulation and taken up by their neighboring cells (cross-correction), resulting in widespread correction of the biochemical defects. As such, the number of cells that must be modified with a gene transfer vector is relatively low.

[0176] Genetic modification can be performed either ex vivo or in vivo. The ex vivo strategy is based on the modification of cells in culture and transplantation of the modified cell into a patient. Cells that are most commonly considered therapeutic targets for monogenic diseases are stem cells. Advances in the collection and isolation of these cells from a variety of sources have promoted autologous gene therapy as a viable option.

[0177] The use of endonucleases for targeted genome editing can solve the limitations presented by the usual gene therapy protocols. These enzymes are custom molecular scissors, allowing cutting DNA into well-defined, perfectly specified pieces, in virtually all cell types. Moreover, they can be delivered to the cells by plasmids that transiently express the nucleases, or by transcribed RNA, avoiding the use of viruses.

### Formulation

[0178] The agents and compositions described herein can be formulated by any conventional manner using one or more pharmaceutically acceptable carriers or excipients as described in, for example, Remington's Pharmaceutical Sciences (A.R. Gennaro, Ed.), 21st edition, ISBN: 0781746736 (2005), incorporated herein by reference in its entirety. Such formulations will contain a therapeutically effective amount of a biologically active agent described herein, which can be in purified form, together with a suitable amount of carrier so as to provide the form for proper administration to the subject.

[0179] The term “formulation” refers to preparing a drug in a form suitable for administration to a subject, such as a human. Thus, a “formulation” can include pharmaceutically acceptable excipients, including diluents or carriers.

[0180] The term “pharmaceutically acceptable” as used herein can describe substances or components that do not cause unacceptable losses of pharmacological activity or unacceptable adverse side effects. Examples of pharmaceutically acceptable ingredients can be those having monographs in United States Pharmacopeia (USP 29) and National Formulary (NF 24), United States Pharmacopeial Convention, Inc, Rockville, Maryland, 2005 (“USP/NF”), or a more recent edition, and the components listed in the continuously updated Inactive Ingredient Search online database of the FDA. Other useful components that are not described in the USP/NF, etc., may also be used.

[0181] The term “pharmaceutically acceptable excipient,” as used herein, can include any and all solvents, dispersion media, coatings, antibacterial and antifungal agents, isotonic, or absorption delaying agents. The use of such media and agents for pharmaceutically active substances is well known in the art (see generally Remington's Pharmaceutical Sciences (A.R. Gennaro, Ed.), 21st edition, ISBN: 0781746736 (2005)). Except insofar as any conventional media or agent is incompatible with an active ingredient, its use in the therapeutic compositions is contemplated. Supplementary active ingredients can also be incorporated into the compositions.

[0182] A “stable” formulation or composition can refer to a composition having sufficient stability to allow storage at a convenient temperature, such as between about 0° C. and about 60° C., for a commercially reasonable period of time, such as at least about one day, at least about one week, at least about one month, at least about three months, at least about six months, at least about one year, or at least about two years.

[0183] The formulation should suit the mode of administration. The agents of use with the current disclosure can be formulated by known methods for administration to a subject using several routes which include, but are not limited to, parenteral, pulmonary, oral, topical, intradermal, intratumoral, intranasal, inhalation (e.g., in an aerosol), implanted, intramuscular, intraperitoneal, intravenous, intrathecal, intracranial, intracerebroventricular, subcutaneous, intranasal, epidural, intrathecal, ophthalmic, transdermal, buccal, and rectal.

[0184] The individual agents may also be administered in combination with one or more additional agents or together with other biologically active or biologically inert agents. Such biologically active or inert agents may be in fluid or mechanical communication with the agent(s) or attached to the agent(s) by ionic, covalent, Van der Waals, hydrophobic, hydrophilic, or other physical forces.

[0185] Controlled-release (or sustained-release) preparations may be formulated to extend the activity of the agent(s) and reduce dosage frequency. Controlled-release preparations can also be used to affect the time of onset of action or other characteristics, such as blood levels of the agent, and consequently, affect the occurrence of side effects. Controlled-release preparations may be designed to initially release an amount of an agent(s) that produces the desired therapeutic effect, and gradually and continually release other amounts of the agent to maintain the level of therapeutic effect over an extended period of time. In order to maintain a near-constant level of an agent in the body, the agent can be released from the dosage form at a rate that will replace the amount of agent being metabolized or excreted from the body. The controlled-release of an agent may be stimulated by various inducers, e.g., change in pH, change in temperature, enzymes, water, or other physiological conditions or molecules.

[0186] Agents or compositions described herein can also be used in combination with other therapeutic modalities, as described further below. Thus, in addition to the therapies described herein, one may also provide to the subject other therapies known to be efficacious for treatment of the disease, disorder, or condition.

### Cell Therapy

[0187] Cells generated according to the methods described herein can be used in cell therapy. Cell therapy (also called cellular therapy, cell transplantation, or cytotherapy) can be a therapy in which viable cells are injected, grafted, or implanted into a patient in order to effectuate a medicinal effect or therapeutic benefit. For example, transplanting T-cells capable of fighting cancer cells via cell-mediated immunity can be used in the course of immunotherapy, grafting stem cells can be used to regenerate diseased tissues, or transplanting beta cells can be used to treat diabetes.

[0188] Stem cell and cell transplantation has gained significant interest by researchers as a potential new therapeutic strategy for a wide range of diseases, in particular for degenerative and immunogenic pathologies.

[0189] Allogeneic cell therapy or allogenic transplantation uses donor cells from a different subject than the recipient of the cells. A benefit of an allogeneic strategy is that unmatched allogenic cell therapies can form the basis of “off the shelf” products.

[0190] Autologous cell therapy or autologous transplantation uses cells that are derived from the subject's own tissues. It could also involve the isolation of matured cells from diseased tissues, to be later re-implanted at the same or neighboring tissues. A benefit of an autologous strategy is that there is limited concern for immunogenic responses or transplant rejection.

[0191] Xenogeneic cell therapies or xenotransplantation uses cells from another species. For example, pig derived cells can be transplanted into humans. Xenogeneic cell therapies can involve human cell transplantation into experimental animal models for assessment of efficacy and safety or enable xenogeneic strategies to humans as well.

### Administration

[0192] Agents and compositions described herein can be administered according to methods described herein in a variety of means known to the art. The agents and composition can be used therapeutically either as exogenous materials or as endogenous materials. Exogenous agents are those produced or manufactured outside of the body and administered to the body. Endogenous agents are those produced or manufactured inside the body by some type of device (biologic or other) for delivery within or to other organs in the body.

[0193] As discussed above, administration can be parenteral, pulmonary, oral, topical, intradermal, intratumoral, intranasal, inhalation (e.g., in an aerosol), implanted, intramuscular, intraperitoneal, intravenous, intrathecal, intracranial, intracerebroventricular, subcutaneous, intranasal, epidural, intrathecal, ophthalmic, transdermal, buccal, and rectal.

[0194] Agents and compositions described herein can be administered in a variety of methods well known in the arts. Administration can include, for example, methods involving oral ingestion, direct injection (e.g., systemic or stereotactic), implantation of cells engineered to secrete the factor of interest, drug-releasing biomaterials, polymer matrices, gels, permeable membranes, osmotic systems, multilayer coatings, microparticles, implantable matrix devices, mini-osmotic pumps, implantable pumps, injectable gels and hydrogels, liposomes, micelles (e.g., up to 30 μm), nanospheres (e.g., less than 1 μm), microspheres (e.g., 1-100 μm), reservoir devices, a combination of any of the above, or other suitable delivery vehicles to provide the desired release profile in varying proportions. Other methods of controlled-release delivery of agents or compositions will be known to the skilled artisan and are within the scope of the present disclosure.

[0195] Delivery systems may include, for example, an infusion pump which may be used to administer the agent or composition in a manner similar to that used for delivering insulin or chemotherapy to specific organs or tumors. Typically, using such a system, an agent or composition can be administered in combination with a biodegradable, biocompatible polymeric implant that releases the agent over a controlled period of time at a selected site. Examples of polymeric materials include polyanhydrides, polyorthoesters, polyglycolic acid, polylactic acid, polyethylene vinyl acetate, and copolymers and combinations thereof. In addition, a controlled release system can be placed in proximity of a therapeutic target, thus requiring only a fraction of a systemic dosage.

[0196] Agents can be encapsulated and administered in a variety of carrier delivery systems. Examples of carrier delivery systems include microspheres, hydrogels, polymeric implants, smart polymeric carriers, and liposomes (see generally, Uchegbu and Schatzlein, eds. (2006) Polymers in Drug Delivery, CRC, ISBN-10: 0849325331). Carrier-based systems for molecular or biomolecular agent delivery can: provide for intracellular delivery; tailor biomolecule/agent release rates; increase the proportion of biomolecule that reaches its site of action; improve the transport of the drug to its site of action; allow colocalized deposition with other agents or excipients; improve the stability of the agent in vivo; prolong the residence time of the agent at its site of action by reducing clearance; decrease the nonspecific delivery of the agent to nontarget tissues; decrease irritation caused by the agent; decrease toxicity due to high initial doses of the agent; alter the immunogenicity of the agent; decrease dosage frequency; improve taste of the product; or improve shelf life of the product.

### Screening

[0197] Also provided are screening methods.

[0198] The subject methods find use in the screening of a variety of different candidate molecules (e.g., potentially therapeutic candidate molecules). Candidate substances for screening according to the methods described herein include, but are not limited to, fractions of tissues or cells, nucleic acids, polypeptides, siRNAs, antisense molecules, aptamers, ribozymes, triple helix compounds, antibodies, and small (e.g., less than about 2000 MW, or less than about 1000 MW, or less than about 800 MW) organic molecules or inorganic molecules including but not limited to salts or metals.

[0199] Candidate molecules encompass numerous chemical classes, for example, organic molecules, such as small organic compounds having a molecular weight of more than 50 and less than about 2,500 Daltons. Candidate molecules can comprise functional groups necessary for structural interaction with proteins, particularly hydrogen bonding, and typically include at least an amine, carbonyl, hydroxyl, or carboxyl group, and usually at least two of the functional chemical groups. The candidate molecules can comprise cyclical carbon or heterocyclic structures and/or aromatic or polyaromatic structures substituted with one or more of the above functional groups.

[0200] A candidate molecule can be a compound in a library database of compounds. One of skill in the art will be generally familiar with, for example, numerous databases for commercially available compounds for screening (see e.g., ZINC database, UCSF, with 2.7 million compounds over 12 distinct subsets of molecules; Irwin and Shoichet (2005) J Chem Inf Model 45, 177-182). One of skill in the art will also be familiar with a variety of search engines to identify commercial sources or desirable compounds and classes of compounds for further testing (see e.g., ZINC database; eMolecules.com; and electronic libraries of commercial compounds provided by vendors, for example, ChemBridge, Princeton BioMolecular, Ambinter SARL, Enamine, ASDI, Life Chemicals, etc.).

[0201] Candidate molecules for screening according to the methods described herein include both lead-like compounds and drug-like compounds. A lead-like compound is generally understood to have a relatively smaller scaffold-like structure (e.g., molecular weight of about 150 to about 350 kD) with relatively fewer features (e.g., less than about 3 hydrogen donors and/or less than about 6 hydrogen acceptors; hydrophobicity character xlogP of about −2 to about 4). In contrast, a drug-like compound is generally understood to have a relatively larger scaffold (e.g., molecular weight of about 150 to about 500 kD) with relatively more numerous features (e.g., less than about 10 hydrogen acceptors and/or less than about 8 rotatable bonds; hydrophobicity character xlogP of less than about 5) (see e.g., Lipinski (2000) J. Pharm. Tox. Methods 44, 235-249). Initial screening can be performed with lead-like compounds.

[0202] When designing a lead from spatial orientation data, it can be useful to understand that certain molecular structures are characterized as being “drug-like”. Such characterization can be based on a set of empirically recognized qualities derived by comparing similarities across the breadth of known drugs within the pharmacopoeia. While it is not required for drugs to meet all, or even any, of these characterizations, it is far more likely for a drug candidate to meet with clinical success if it is drug-like.

[0203] Several of these “drug-like” characteristics have been summarized into the four rules of Lipinski (generally known as the “rules of fives” because of the prevalence of the number 5 among them). While these rules generally relate to oral absorption and are used to predict the bioavailability of a compound during lead optimization, they can serve as effective guidelines for constructing a lead molecule during rational drug design efforts such as may be accomplished by using the methods of the present disclosure.

[0204] The four “rules of five” state that a candidate drug-like compound should have at least three of the following characteristics: (i) a weight less than 500 Daltons; (ii) a log of P less than 5; (iii) no more than 5 hydrogen bond donors (expressed as the sum of OH and NH groups); and (iv) no more than 10 hydrogen bond acceptors (the sum of N and O atoms). Also, drug-like molecules typically have a span (breadth) of between about 8A to about 15A.

### Kits

[0205] Also provided are kits. Such kits can include an agent or composition described herein and, in certain embodiments, instructions for administration. Such kits can facilitate performance of the methods described herein. When supplied as a kit, the different components of the composition can be packaged in separate containers and admixed immediately before use. Components include, but are not limited to reagents disclosed herein. Such packaging of the components separately can, if desired, be presented in a pack or dispenser device which may contain one or more unit dosage forms containing the composition. The pack may, for example, comprise metal or plasticfoil such as a blister pack. Such packaging of the components separately can also, in certain instances, permit long-term storage without losing activity of the components.

[0206] Kits may also include reagents in separate containers such as, for example, sterile water or saline to be added to a lyophilized active component packaged separately. For example, sealed glass ampules may contain a lyophilized component and in a separate ampule, sterile water, sterile saline each of which has been packaged under a neutral non-reacting gas, such as nitrogen. Ampules may consist of any suitable material, such as glass, organic polymers, such as polycarbonate, polystyrene, ceramic, metal, or any other material typically employed to hold reagents. Other examples of suitable containers include bottles that may be fabricated from similar substances as ampules and envelopes that may consist of foil-lined interiors, such as aluminum or an alloy. Other containers include test tubes, vials, flasks, bottles, syringes, and the like. Containers may have a sterile access port, such as a bottle having a stopper that can be pierced by a hypodermic injection needle. Other containers may have two compartments that are separated by a readily removable membrane that upon removal permits the components to mix. Removable membranes may be glass, plastic, rubber, and the like.

[0207] In certain embodiments, kits can be supplied with instructional materials. Instructions may be printed on paper or another substrate, and/or may be supplied as an electronic-readable medium or video. Detailed instructions may not be physically associated with the kit, instead, a user may be directed to an Internet web site specified by the manufacturer or distributor of the kit.

[0208] A control sample or a reference sample as described herein can be a sample from a healthy subject or sample, a wild-type subject or sample, or from populations thereof. A reference value can be used in place of a control or reference sample, which was previously obtained from a healthy subject or a group of healthy subjects or a wild-type subject or sample. A control sample or a reference sample can also be a sample with a known amount of a detectable compound or a spiked sample.

[0209] The methods and algorithms of the invention may be enclosed in a controller or processor. Furthermore, methods and algorithms of the present invention, can be embodied as a computer-implemented method or methods for performing such computer-implemented method or methods, and can also be embodied in the form of a tangible or non-transitory computer-readable storage medium containing a computer program or other machine-readable instructions (herein “computer program”), wherein when the computer program is loaded into a computer or other processor (herein “computer”) and/or is executed by the computer, the computer becomes an apparatus for practicing the method or methods. Storage media for containing such computer program include, for example, floppy disks and diskettes, compact disk (CD)-ROMs (whether or not writeable), DVD digital disks, RAM and ROM memories, computer hard drives and back-up drives, external hard drives, “thumb” drives, and any other storage medium readable by a computer. The method or methods can also be embodied in the form of a computer program, for example, whether stored in a storage medium or transmitted over a transmission medium such as electrical conductors, fiber optics or other light conductors, or by electromagnetic radiation, wherein when the computer program is loaded into a computer and/or is executed by the computer, the computer becomes an apparatus for practicing the method or methods. The method or methods may be implemented on a general-purpose microprocessor or on a digital processor specifically configured to practice the process or processes. When a general-purpose microprocessor is employed, the computer program code configures the circuitry of the microprocessor to create specific logic circuit arrangements. Storage medium readable by a computer includes medium being readable by a computer per se or by another machine that reads the computer instructions for providing those instructions to a computer for controlling its operation. Such machines may include, for example, machines for reading the storage media mentioned above.

[0210] Compositions and methods described herein utilizing molecular biology protocols can be according to a variety of standard techniques known to the art (see e.g., Sambrook and Russel (2006) Condensed Protocols from Molecular Cloning: A Laboratory Manual, Cold Spring Harbor Laboratory Press, ISBN-10: 0879697717; Ausubel et al. (2002) Short Protocols in Molecular Biology, 5th ed., Current Protocols, ISBN-10: 0471250929; Sambrook and Russel (2001) Molecular Cloning: A Laboratory Manual, 3d ed., Cold Spring Harbor Laboratory Press, ISBN-10: 0879695773; Elhai, J. and Wolk, C. P. 1988. Methods in Enzymology 167, 747-754; Studier (2005) Protein Expr Purif. 41(1), 207-234; Gellissen, ed. (2005) Production of Recombinant Proteins: Novel Microbial and Eukaryotic Expression Systems, Wiley-VCH, ISBN-10: 3527310363; Baneyx (2004) Protein Expression Technologies, Taylor & Francis, ISBN-10: 0954523253).

[0211] Definitions and methods described herein are provided to better define the present disclosure and to guide those of ordinary skill in the art in the practice of the present disclosure. Unless otherwise noted, terms are to be understood according to conventional usage by those of ordinary skill in the relevant art.

[0212] In some embodiments, numbers expressing quantities of ingredients, properties such as molecular weight, reaction conditions, and so forth, used to describe and claim certain embodiments of the present disclosure are to be understood as being modified in some instances by the term “about.” In some embodiments, the term “about” is used to indicate that a value includes the standard deviation of the mean for the device or method being employed to determine the value. In some embodiments, the numerical parameters set forth in the written description and attached claims are approximations that can vary depending upon the desired properties sought to be obtained by a particular embodiment. In some embodiments, the numerical parameters should be construed in light of the number of reported significant digits and by applying ordinary rounding techniques. Notwithstanding that the numerical ranges and parameters setting forth the broad scope of some embodiments of the present disclosure are approximations, the numerical values set forth in the specific examples are reported as precisely as practicable. The numerical values presented in some embodiments of the present disclosure may contain certain errors necessarily resulting from the standard deviation found in their respective testing measurements. The recitation of ranges of values herein is merely intended to serve as a shorthand method of referring individually to each separate value falling within the range. Unless otherwise indicated herein, each individual value is incorporated into the specification as if it were individually recited herein. The recitation of discrete values is understood to include ranges between each value.

[0213] In some embodiments, the terms “a” and “an” and “the” and similar references used in the context of describing a particular embodiment (especially in the context of certain of the following claims) can be construed to cover both the singular and the plural, unless specifically noted otherwise. In some embodiments, the term “or” as used herein, including the claims, is used to mean “and/or” unless explicitly indicated to refer to alternatives only or the alternatives are mutually exclusive.

[0214] The terms “comprise,” “have” and “include” are open-ended linking verbs. Any forms or tenses of one or more of these verbs, such as “comprises,” “comprising,” “has,” “having,” “includes” and “including,” are also open-ended. For example, any method that “comprises,” “has” or “includes” one or more steps is not limited to possessing only those one or more steps and can also cover other unlisted steps. Similarly, any composition or device that “comprises,” “has” or “includes” one or more features is not limited to possessing only those one or more features and can cover other unlisted features.

[0215] All methods described herein can be performed in any suitable order unless otherwise indicated herein or otherwise clearly contradicted by context. The use of any and all examples, or exemplary language (e.g., “such as”) provided with respect to certain embodiments herein is intended merely to better illuminate the present disclosure and does not pose a limitation on the scope of the present disclosure otherwise claimed. No language in the specification should be construed as indicating any non-claimed element essential to the practice of the present disclosure.

[0216] Groupings of alternative elements or embodiments of the present disclosure disclosed herein are not to be construed as limitations. Each group member can be referred to and claimed individually or in any combination with other members of the group or other elements found herein. One or more members of a group can be included in, or deleted from, a group for reasons of convenience or patentability. When any such inclusion or deletion occurs, the specification is herein deemed to contain the group as modified thus fulfilling the written description of all Markush groups used in the appended claims.

[0217] All publications, patents, patent applications, and other references cited in this application are incorporated herein by reference in their entirety for all purposes to the same extent as if each individual publication, patent, patent application, or other reference was specifically and individually indicated to be incorporated by reference in its entirety for all purposes. Citation of a reference herein shall not be construed as an admission that such is prior art to the present disclosure.

[0218] Having described the present disclosure in detail, it will be apparent that modifications, variations, and equivalent embodiments are possible without departing the scope of the present disclosure defined in the appended claims. Furthermore, it should be appreciated that all examples in the present disclosure are provided as non-limiting examples.

### EXAMPLES

[0219] The following non-limiting examples are provided to further illustrate the present disclosure. It should be appreciated by those of skill in the art that the techniques disclosed in the examples that follow represent approaches the inventors have found function well in the practice of the present disclosure, and thus can be considered to constitute examples of modes for its practice. However, those of skill in the art should, in light of the present disclosure, appreciate that many changes can be made in the specific embodiments that are disclosed and still obtain a like or similar result without departing from the spirit and scope of the present disclosure.

### Example 1

[0220] Multi-kilobase knock-ins (KIs) are a necessary, yet challenging type of genome editing to create and characterize in cell lines and animals. The combination of rAAV donor transduction and electroporation of single-cell mouse embryos with Cas9/gRNA ribonucleoprotein complex (RNP) enables highly efficient KI, but the insert size is limited by the viral packaging capacity. In Example 1, over 100 KI mice created with single rAAV donors are reported on and variables affecting KI efficiency are identified. To overcome the size limit of the rAAV genome, it is shown for the first time that co-delivery of up to three rAAV donors with CRISPR RNPs achieve 6.6 kb precise KI in mouse embryos. To fully characterize the edited genome, LOCK-seq (LOng-read sequencing of Captured Kilo-base targets) was developed. By leveraging biotinylated probe-based hybridization, LOCK-seq achieves >100-fold on-target read depth than previous Cas9-based enrichment methods. The approach simultaneously verifies the precision of KI, detects imperfections in KI, such as partial deletions and insertions as well as donor concatenation, variable sized indels in the non-KI allele and more importantly, localizes random integration of the full or partial donor, which other commonly used methods cannot. Additionally, the multi-rAAV donor approach was applied in cancer and stem cell lines, including BV2 cells where KI was previously thought to be impossible due to intolerance to plasmid DNA. In summary, the targetable insert length is expanded in both mice and cell lines using CRISPR and rAAV donors and a much-needed, sensitive method for surveying both desired targeted integration and undesired, potentially phenotypic-skewing modification events in cell and mouse models is reported.

### Materials and Methods

gRNA Design

[0221] gRNAs were designed using an in-house algorithm that incorporates off-target MIT specificity scores and Cutting Frequency Determination (CFD) scores weighted on the homology of the spacer sequence to other sites in the genome. The algorithm also reports SNPs at on-target sites from the Mouse Genomes Project. The selection of gRNAs prioritized higher specificity of spacer sequences with low off-target scores (>70 MIT, >0.2 CFD), proximity of the cut site to the insertion site, and absence of SNPs within the target strain background. Synthetic gRNAs were purchased as Alt-R single gRNAs from IDT (Coralville, Iowa). All gRNAs used for the present disclosure are listed in SEQ ID NO: 17-155.

### AAV Vector and Virus Production

[0222] Donors were synthesized by VectorBuilder (Chicago, IL), BioBasic (Amherst, NY), or Genscript (Piscataway, NJ) with flanking canonical AAV2 ITR sequences or cloned into a vector carrying canonical ITRs (5′cctgcaggcagctgcgcgctcgctcgctcactgaggccgcccgggcaaagcccgggcgtcgggcgacctttggtcgccc ggcctcagtgagcgagcgagcgcgcagagagggagtggccaactccatcactaggggttcct-3′, SEQ ID NO: 1) or one canonical and one alternative ITR (5′-aggaacccctagtgatggagttggccactccctctctgcgcgctcgctcgctcactgaggccgggcgaccaaaggtcgcccg acgcccgggcggcctcagtgagcgagcgagcgcgcagctgcctgcagg-3′, SEQ ID NO: 2). All donors used for the present disclosure are listed in SEQ ID NO: 156-318. Production of rAAV6 virus was performed by the Hope Viral Vectors Core (Washington University, St. Louis, MO) using iodixanol gradient purification, or from VectorBuilder (Chicago, IL) or Genscript (Piscataway, NJ) as a crude preparation from cell-free medium. A difference in efficiency was not observed between the two types of preparations.

Validation of sgRNAs and rAAV Donors in N2a Cells

[0223] N2a cells were cultured in DMEM media +10% FBS, +1% Glutamax, +1% Pen-Strep at 37° C. in a humidified incubator with 5% CO₂ and passaged using 0.25% Trypsin-EDTA using standard cell culture techniques. Cas9/gRNA RNPs were complexed at room temperature by mixing 1 μl of recombinant Cas9 protein (40 μM, from QB3 MacroLab, UC Berkeley) with 1 μl of each sgRNA (100 μM). Nucleofections were performed using 150,000 cells in 20 μl OPTI-MEM or P3 solution and DS-137 program. After nucleofection, cells were immediately seeded in a well of a 24-well plate with 500 ul of growth medium supplemented with 1 μl of each rAAV donor and harvested 72 hr later for genotyping. All reagents for mouse projects were validated in N2a cells first before being used in mouse production.

### Amplicon NGS for CRISPR Cleavage Activity at the Target Site

[0224] Transfected N2a cells or tail clips of mice were lysed in QuickExtract Solution (Biosearch Technologies, cat. #QE09050), following manufacturer's instructions. The target regions were PCR amplified by tailed primers appended with 5′-CACTCTTTCCCTACACGACGCTCTTCCGATCT-3′ (SEQ ID NO: 3) for forward and 5′-GTGACTGGAGTTCAGACGTGTGCTCTTCCGATCT-3′ (SEQ ID NO: 4) for reverse to genomic-specific primer sequences (PCR 1), which allows unique indexes and Illumina P5/P7 adapter sequences to be added in a second round of PCR. All primer sequences are listed in SEQ ID NO: 319-376. PCR amplifications were performed with JumpStart REDTaq ReadyMix (MilliporeSigma, cat. #P0982), following the manufacturer protocol. The following cycling conditions were used: 94° C. for 2 min, followed by five cycles of 94° C. for 30 s, 54° C. for 30 s, and 72° C. for 40 s. 2×250 reads were generated with the Illumina MiSeq platform at the Center for Genome Sciences and Systems Biology (Washington University, St. Louis, MO). The extracted FASTQ files are analyzed using a Python-based script which outputs editing efficiency.

### Junction PCRs to Confirm Targeted Integration

[0225] The same N2a lysates were used as templates for junction PCRs for detecting knock-in events. All junction PCR primers span flanking genomic and cassette-specific sequence or junctions between rAAV-specific cassettes when using multiple rAAV donors. PCR amplification was performed using primers listed in SEQ ID NO: 319-376 with Platinum SuperFi II Green PCR Master Mix (ThermoFisher, cat. #12369050) or JumpStart REDTaq ReadyMix (MilliporeSigma, cat. #P0982).

### Mouse Husbandry and Embryo Manipulation

[0226] All animals at Washington University in St. Louis are housed under SPF barrier conditions in AALAC-accredited facilities. All required breeding, experiments and interventions are included in IACUC approved protocols. The Department of Comparative Medicine provides basic husbandry in accordance with their procedures. Three to four weeks-old C57BL/6J mice (JAX Laboratories, Bar Harbor ME, USA) were superovulated by intraperitoneal injection of 5 IU pregnant mare serum gonadotropin, followed 47 h later by intraperitoneal injection of 5 IU human chorionic gonadotropin (PMS from SIGMA, HGC from Millipore USA). Mouse zygotes were obtained by mating C₅₇BL/6J stud males with superovulated C₅₇BL/6J females at a 1:1 ratio. rAAV transduction of zygotes was performed as previously reported. Briefly, 10⁹-10¹⁰ viral particles were added to each KSOM droplet containing 20-30 zygotes covered with paraffin oil and allowed to incubate for 5-6 hours in a humidified tissue culture incubator (37° C., 5% CO₂). The zygotes were then washed and electroporated with Cas9/sgRNA complex as previously described. Briefly, one-cell fertilized embryos were electroporated with RNPs containing 12 μg of Cas9 protein complexed with 1:1.5 molar ratio of gRNA. Between 30 to 40 post-transduction zygotes in 10 μl of OPTI-MEM are mixed with 10 μl of RNP in OPTI-MEM before being loaded into a 1 mm electroporation cuvette. With a Biorad Gene Pulser Xcell electroporator, 2-6 pulses of 30V were used for 3 ms with 100 ms internals. Post-electroporation embryos were kept in 25 μl drops of KSOM overlayed with oil and in a humidified tissue culture incubator (37° C., 5% CO₂) for 1-2 hours before being surgically transferred to 0.5d PC pseudopregnant surrogates.

[0227] For multiple rAAVs, all rAAV donors were combined at equal number of viral particles before adding onto the zygotes. After incubation, the washed zygotes were electroporated with all necessary RNPs at equal molar ratio, with the total RNP mass per electroporation held constant at 12 ug.

[0228] Founder genotyping by junction PCRs and detection of random integration by ITR PCRs Founder genotyping was done using conditions optimized during validation. A primer used for the detection ITR-containing donor random integration binds to the hairpin of the ITR, 5′-TGGCCAACTCCATCACTAGG-3′ (SEQ ID NO: 5 and SEQ ID NO: 377-816, XCC216c.AAV2.ITR.F2-R2) and pairs with an insert specific primer at each end of the donor.

Cas9-Targeted Sequencing (nCATS)

[0229] Genomic DNA from tail clips was isolated with the Monarch Genomic DNA Purification Kit (NEB, cat. #T3010S). nCATS was performed using the Oxford Nanopore's Cas9 Sequencing Kit (cat. #SQK-CS9109) according to the manufacturer's instructions. Briefly, 5 μg of extracted DNA was 5′ dephosphorylated and cut with a pair of RNPs (5′-TAAGGGAGCTGCAGTGGAGT-3′ (SEQ ID NO: 6), 5′ GGATTTAGCCACATCCATAG-3′ (SEQ ID NO: 7)) flanking the region of interest. RNPs were each prepared using 100 μM of gRNA complexed with 30 μM of Cas9 protein (QB3 MacroLab, UC Berkeley) and added in a dA-tailing cocktail at 37° C. for 35 min. Adapter ligation and clean-up was performed using the Ligation Sequencing Kit V14 (Oxford Nanopore Technologies, cat. #SQK-LSK114) and the final library run on an R10.4.1 MinION flow cell (Oxford Nanopore Technologies, cat. #R10.4.1).

### LOCK-Seq (LOng-Read Sequencing of Captured Kilo-Base Targets)

[0230] Genomic DNA was isolated from tissue and cell pellets using the Monarch Genomic DNA Purification Kit (NEB, cat. #T3010S) or with QuickExtract DNA Extraction Solution (Biosearch Technologies, cat. #QE0901 L), according to the respective manufacturer's instructions.

### Tagmentation

[0231] Tagmentation with Tn5 LongPlex Long Fragment Multiplexing Kit (seqWell, cat. #301312) was used according to the manufacturer's protocol or an in-house protocol for multiplexing. For in-house tagmentation, Tn5 protein (QB3 MacroLab, UC Berkeley) was complexed with annealed oligonucleotide adapters. Briefly, 16.5 uM of adapter primers (Tn5ME-A 5′-TCGTCGGCAGCGTCAGATGTGTATAAGAGACAG-3′ (SEQ ID NO: 8) and Tn5ME-B 5′-GTCTCGTGGGCTCGGAGATGTGTATAAGAGACAG-3′ (SEQ ID NO: 9), each annealed with Tn5MErev 5′-[phos]CTGTCTCTTATACACATCT-3′ (SEQ ID NO: 10) was added to Tn5 protein (500 ng/μl) and incubated at room temperature, shaking at 200 rpm. Tagmentation was performed with 10 μl of crude lysate in 10 mM TAPS-NaOH, pH 8.5, 5 mM MgCl₂, and 7% PEG 8000 in a total reaction volume of 20 ul for 5 min at 55° C. The resulting fragmented genomic DNA was cleaned up using 0.7× JetSeq Clean magnetic beads (Meridian Biosciences, cat. #BIO-68032) and eluted in 20 μl. Barcodes were introduced by PCR using KOD Xtreme Hot Start DNA Polymerase (MilliporeSigma, cat. #71975-3), with primers specific to the universal adapter tail sequences introduced by Tn5. Each PCR reaction used the full volume of fragmented DNA from the previous step with 2 mM of each dNTP and 10 μM of each primer in a final volume of 50 μl. Cycling conditions were 94° C. for 2 min, 8 cycles of 98° C. for 10 sec, 68° C. for 10 min, and a final 72° C. hold for 10 min.

### Mechanical Fragmentation

[0232] Up to 5 μg of genomic DNA prepared by using the Monarch kit was loaded onto a Covaris g-TUBE (Covaris, cat. #520079) and centrifuged at 4900×g for 1 min to generate fragments in the 10 kb size range. Fragmented DNA was end-repaired and A-tailed using the TWIST Mechanical Fragmentation Kit (TWIST, cat. #101281), ligated to TruSeq compatible adapters (TWIST, cat. #101310) and barcoded using PCR with KOD Xtreme Hot Start Polymerase, following the manufacturer's protocols. Specifically, the cycling conditions include 94° C. for 2 min, 8 cycles of 98° C. for 10 sec, 58.8° C. for 30 sec and 68° C. for 10 min, and a final 68° C. hold for 10 min. Indexed samples were pooled to a final mass of 4-6 ug for hybridization.

### Biotinylated Probes

[0233] Custom capture probes were acquired from xGen IDT or generated in-house using a two-step PCR and tiled at densities of 1-4 probes/kb (commercially purchased probe sequences listed in SEQ ID NO: 377-816).

[0234] In-house generated LOCK-seq probes presented in FIG. 7(A-B) used tailed primers appended with 5′-CACTCTTTCCCTACACGACGCTCTTCCGATCT-3′ (SEQ ID NO: 11) for forward and 5′-GTGACTGGAGTTCAGACGTGTGCTCTTCCGATCT-3′ (SEQ ID NO: 12) for reverse to genomic-specific primer sequences to target regions, followed by a second step asymmetric PCR with universal primers appended with a 5′ biotin for the forward primer (forward 5′Biotin-CACTCTTTCCCTACACGACGCTCTTCCGATCT 3′ (SEQ ID NO: 13), reverse 5′ GTGACTGGAGTTCAGACGTGTGCTCTTCCGATCT-3′ (SEQ ID NO: 14)). The asymmetric PCR with universal primers were appended with a 5′ biotin for both primers (forward 5′Biotin-agtcaggtgcccaatgtacc-3′ (SEQ ID NO: 15), reverse 5′-Biotin-taggcagttcgctccaagc-3′ (SEQ ID NO: 16)). Primer sequences for all in-house generated probes are listed in SEQ ID NO: 817-1002. PCR amplifications were performed with JumpStart REDTaq ReadyMix (MilliporeSigma, cat. #P0982), according to the manufacturer's protocol. The asymmetric PCR was performed using 0.1× volume of PCR product (no clean-up step) from step1 with the forward primer at 10 μM and reverse primer at 0.5 μM and melting at 94° C. for 2 min, followed by twenty cycles of 94° C. for 30 s, 60° C. for 10 s, and 72° C. for 20 s. Amplicons were pooled and cleaned-up using the Zymo DNA clean and Concentrator kit (Zymo Research, cat #.D4004).

[0235] To generate multiple biotin moieties across probes during the asymmetric PCR step, KOD Xtreme Hot Start DNA Polymerase was used with 2 mM each dATP, dCTP, and dGTP, 1.6 mM dTTP and 0.4 mM Biotin-11-dUTP (ThermoFisher cat. #R0081), with the forward primer at 10 μM and reverse primer at 0.5 μM and melting at 98° C. for 2 min, followed by 20 cycles of 98° C. for 10 s, 60° C. for 10 s, and 68° C. for 20 s.

### Hybridization

[0236] Multiplexed samples were hybridized with biotinylated probes using Twist Standard Hyb and Wash Kit (cat. #104446), and hybridization reactions for 16-18 hrs were performed according to the manufacturer's protocol for TWIST. Briefly, the pooled DNA was blocked with Universal Blockers (TWIST, cat. #100578) and 5 μg of Mouse Cot-1 DNA (Invitrogen, cat. #18440016) to minimize non-specific capture in the hybridization reagent. Blocking was performed by heating the mixture at 95° C. for 5 minutes, cooling at room temperature for 5 min, and proceeding immediately with the 16-18 hr at 70° C. overnight hybridization with the biotinylated probe panel.

### Post-Hybridization Enrichment

[0237] Target-captured libraries were enriched following the TWIST (catalog #104446) post-capture workflow. Briefly, biotinylated DNA-probe hybrids were captured with Dynabeads M-270 Streptavidin (ThermoFisher, cat. #65305) at 68° C. for 10 minutes. Beads were washed per manufacturer's instructions, and bound DNA was released with 0.2 N NaOH. The eluate was neutralized and used directly for post-capture PCR with KOD Xtreme Hot Start DNA Polymerase using TWIST universal adapter primers. Thermocycling conditions were 94° C. for 2 min, 18 cycles of: 98° C. for 10 sec; 58.8° C. for 30 sec; 68° C. for 10 min, with a final extension of 68° C. for 10 min. PCR products were purified by DINOMAG SPRI (Labscoop, cat. #DN9004-5ML) bead cleanup at 0.5× bead:sample ratio.

[0238] For FIG. 4B, FIG. 16(A-E), and FIG. 19(A-B) (Project XCB528) a double hybridization was performed using the output from the first round as the input for a second round of hybridization, repeating the process with a fresh aliquot of probes. This can be performed to increase the percent of on-target reads.

### ONT Library Preparation

[0239] Ligation of Oxford Nanopore sequencing adapters was performed for all libraries using the Ligation Sequencing Kit V14 (Oxford Nanopore Technologies, cat. #SQK_LSK114) and loaded onto an Oxford Nanopore Technologies flow cell (FLO-MIN114 or FLO-PRO114HD).

### LOCK-Seq Analysis

[0240] Base calling was performed using Guppy or Dorado (v0.7), and samples were demultiplexed with Nanoplexer or an in-house python script. The code for demultiplexing and the analysis pipeline will be deposited at github.com/msentmanat/LOCK-seq-analysis-pipeline. Briefly, no trimming was performed, and for the in-house demultiplexing script, exact index matches for both indexes were required. Reads with >1 match for either index or lacking one index were excluded. Capture efficiency was determined using flagstat output (total reads mapped to transgene/total reads) and length of mapped reads calculated using FASTQ files derived from transgene mapped BAM files for each sample. FASTQ files were aligned to the transgene first using Minimap2 (v2.28), mapped reads (.fastq) were pulled using Samtools (v1.20), and then mapped to the reference genome (mm39) using Minimap2 (v2.28) and Samtools (v1.20). Using the Samtools depth command, the top 10 genomic coordinates (based on highest read depth, ˜20 kb window) were used to generate a bed file to pull reads from the bam files. Those regions were investigated by manual curation on IGV and Canu to identify random integration events (FIG. 8). FASTQ files were used to build consensus sequences using Canu (v2.2) and visualized using Snapgene. The per base coverage was plotted with normalized reads from Samtools depth output in R.

[0241] Gene editing in N2a, BV2, HEK293T, and iPSCs N2a, BV2 and HEK293T cells were cultured in DMEM media +10% FBS, +1% Glutamax, +1% Pen-Strep at 37° C. in a humidified incubator with 5% CO₂ and passaged using 0.25% Trypsin-EDTA using standard culture conditions. iPSC cells were cultured on Matrigel-coated (Corning, cat #0.354277) 6-well plates with mTeSR Plus (STEMCELL Technologies, cat. #100-0276) media at 37° C. in a humidified incubator with 5% CO₂, and passaged using ReLeSR (STEMCELL Technologies, cat. #100-0483) passaging reagent. Cas9 RNPs were complexed at room temperature by mixing 1 μl of recombinant Cas9 protein (40 μM, from QB3 MacroLab, UC Berkeley) with 1 μl of each sgRNA (100 μM). Nucleofections were performed using 150,000 cells per 20 μl reaction (N2a and HEK293T), or one confluent well of a 6-well plate was used for 4-6 reactions (iPSCs). Cells were detached from tissue culture substrate, washed twice with PBS, then resuspended into Opti-MEM media (N2a and HEK293T) or P3 solution (Lonza, cat. #V4SP-3096 for iPSCs) and nucleofected using a Lonza 4D nucleofector with standard programs (N2a: DS-137, HEK293T: CM-130, iPSC: CA-137).

[0242] Nucleofected N2a, BV2 and HEK293T cells were seeded into 500 μl of complete culture medium in a well of a 24-well tissue culture plate, supplemented with 1 μL of each AAV donor, and harvested 72 h post-nucleofection for genotyping and expansion for sorting. Nucleofection iPSC cells were seeded into 500 μl of mTeSR Plus media supplemented with 10% CloneR2 (STEMCELL Technologies, cat. #100-0691) for 24 h, and the media was changed to regular mTeSR Plus media for the next 48 h. Nucleofected pools were propagated under standard conditions until genotyping was confirmed. All reagents for mouse projects were validated in N2a cells first before used in mouse production.

[0243] To generate clonal edited lines, pools were single-cell dissociated with 0.25% trypsin (N2a, BV2 and HEK293T cells) or 0.75× TrypLE (Fisher Scientific, cat. #12-604-013, iPSC cells), and single cells were sorted into 96-well tissue culture plates on a Sony SH800 cell sorter. N2a cells were sorted into complete media supplemented with 10 μM ROCK inhibitor (MilliporeSigma cat #SCM075) and 1 mM sodium pyruvate (ThermoFisher, cat #11360070) while HEK293T cells were sorted into 50% conditioned media, and iPSCs were sorted into mTeSR Plus supplemented with 10% CloneR2. Clones were monitored for growth, with changes of complete media every 3-5 days (N2A and HEK293T) or 2-3 days (iPSCs) until >40% confluent, then harvested, consolidated, and genotyped by junction PCRs as in described above.

### Results

rAAV Donors Mediate Efficient HDR in Mouse Embryos

[0244] By transduction of mouse embryos with a single rAAV donor, followed by Cas9/gRNA RNP electroporation, 108 mouse models were successfully created with insert sizes ranging from 400 bp to 3.5 kb (FIG. 2A). Founder rates among live births were 1% to 80%, identified by junction PCRs (FIG. 2B). There is a trend that the longer the insert, the less efficient the insertion. However, the strongest correlation is between KI efficiency and length of insert/total homology: each doubling of homology length relative to the insert results in a 30% or greater increase in efficiency of generating founders (R=−0.28, p-value=0.004; FIG. 2C). Fifteen out of the 108 models were gene replacements, generated using one donor and two gRNAs that excise the region targeted for replacement while facilitating HDR (FIG. 9). Gene replacement was as efficient as direct insertion among these models (FIG. 2D).

### Sequential Insertion of Multiple rAA V Donors for Larger Inserts

[0245] To overcome the 4.7 kb size limitation of an rAAV genome, a sequential insertion strategy was designed, where the first donor delivers a portion of the insert along with a gRNA target site, to mediate cleavage and subsequent insertion from the second donor (FIG. 3A). The gRNA target site in the donor can be identical to the genomic target site, or unrelated, such as a previously validated site from a different species or a new site created by the insertion. The gRNA target is not cleavable in the single-stranded rAAV genome. For even larger inserts, the second rAAV donor brings in an additional gRNA target site to mediate the third insertion (FIG. 3A). All rAAV donors and RNPs are delivered to single-cell embryos in a single step. The consecutive HDR events happen one after the other upon respective CRISPR cleavage within the embryos. To date, 13 models with two-rAAVs and 3 with three-rAAVs have been completed (FIG. 3B). All but one of the multi-rAAV models are targeting the mouse ROSA26 locus. Seven of the two-rAAV-donor and 3 of three-rAAV-donor projects are for conditional expression of a given cDNA from the ROSA26 locus, using the configuration CAG-loxP-3xSV40 pA-loxP-cDNA-pA. Given the cassette CAG-loxP-3xSV40 pA-loxP-pA is common for all, a rAAV donor was created to first insert this common cassette (FIG. 10) and a second (and a third if needed) rAAV will deliver the cDNA. The homology arms were identical for the second donors among different projects. Efficiency ranges from 5 to 67% for 2-rAAV projects were achieved, and about 5% for three-rAAV projects. Of the 133 projects, nine projects failed the first two sessions without obvious reasons, five with single rAAV donors, three with two rAAV donors, and one with three rAAV donors.

[0246] The increasing insert size via sequential HDR events renders genotyping by junction PCRs tedious and inconclusive for several reasons, including low-complexity sequences, mosaicism for the KI allele in founders, and imprecise insert. Multiple PCRs are required to screen founders, targeting the internal cassette and genomic junctions, yet results can be difficult to interpret when animals are positive for only a subset of PCRs (FIG. 11(A-E)). Adding to the complexity, founder animals are often mosaic and harbor more than two alleles. The presence of positive junctions do not guarantee a full-length insertion event. And the correctly targeted allele, if much less abundant, can be missed in PCR detection. The use of multiple rAAV donors further complicates screening, as each additional donor introduces two more new junctions (FIG. 12(A-G)). A reliable method with minimal bias is required for screening such complex events. Additionally, rAAV random integration has been reported previously. To better prioritize animals without viral genome integration, primers were designed that bind to the hairpin region of the ITRs and donor sequence so that animals negative for the ITR-specific PCR and positive forjunctions are prioritized (FIG. 13(A-C)). On average, 37% of junction positive animals were also positive for ITRs. However, the PCR-based method does not reveal the random integration sites in the genome and will miss random integrations without ITRs.

### LOCK-Seq

[0247] To better characterize rAAV-mediated KI events, the Cas9 Sequencing Kit (a.k.a. nCATS) from Oxford Nanopore (SQK-CS9109) was first used, which depends on Cas9/gRNA binding and cleavage close to the target. Although on-target reads were captured, the low coverage and throughput make it impractical for screening multiple founders (FIG. 14(A-C)). A new method with significantly higher efficiency of target enrichment than using Cas9/CRISPR recognition is needed.

[0248] A probe-based approach was developed using 5′ biotinylated 120-mer DNA oligos complementary to the insert, homology arms, flanking genomic regions, and ITRs and it was termed LOCK-seq. High molecular weight genomic DNA is fragmented (by using Tn5 transposition or physical sharing with Covaris g-TUBEs), ligated to adapters with barcodes, and undergoes low-cycle PCR amplification to enrich adapter-ligated product. Barcoded samples corresponding to the same target are pooled and hybridized to the capture probes for selective pull-down of sequences of interest.

[0249] In a direct side-by-side comparison, LOCK-seq yielded >100-fold on-target coverage than nCATS (FIG. 14(A-C)). This is attributable to two factors. First, low on-target capture efficiency (1% vs 10%) for nCATS and excess adapter-free DNA that although cannot productively occupy pores, can transiently interact with pores and motor-protein bound DNA, reducing pore occupancy. The increased enrichment and read depth open the door to multiplexing many barcoded samples on a single MinION flow cell, making large-scale genotyping of founders feasible (FIG. 15(A-C) and FIG. 4A).

[0250] Moreover, LOCK-seq requires as little as 250 ng of genomic DNA, compared to 1-5 mg for nCATS, which is a significant amount to isolate from routine tissue biopsies of founder animals. Importantly, LOCK-seq identifies both knock-in alleles and indels at the target site, including random donor integrations, even if donor(s) only partially integrated elsewhere in the genome.

[0251] Four mouse samples (a founder, M24, and three F1s of M24: F19, F20 and F21) were first analyzed with a 741 bp mCherry cassette inserted at the Syk gene, one of the 108 mouse models were created using a single rAAV (data not shown). The genomic DNA was fragmented using Covaris g-TUBEs. Biotinylated 120-mer single stranded oligo probes tiled the entire length of the 2.4 kb rAAV genome and 2 kb of flanking sequences. The samples were pooled and underwent a double hybridization reaction where the enriched product from the first found of hybridization underwent a second hybridization with fresh probes to maximize specificity. The post-hybridization, single-stranded DNA was then PCR amplified, ligated to motor protein and run on a PromethION flow cell (8× the number of pores compared to MinION flow cell), given previous poor depth obtained using nCATS.

[0252] The average length for mapped reads was 2.7 kb across these four samples, with the maximum read-lengths ranging from 84-102 kb, average on-target coverage of 254K reads/sample and resulting in a capture efficiency of 85% (data not shown). Full-length, continuous reads spanning the donor and flanking genomic DNA outside of both homology arms were recovered for all samples (FIG. 16(A-E)). Out of the four samples, F20 was closest to a heterozygous insertion with equivalent coverage across the insert, supporting the absence of aberrant integration events (FIG. 4B). The other two F1 samples, F19 and F21, shared similar patterns in coverage variation as the founder, indicative of random integration events that were further analyzed below. It was determined that the combination of using a PromethION flow cell and double hybridization was overkill even for multiplexed samples. MinION flow cells and a single hybridization step were used on later samples.

[0253] FIG. 4C shows an IGV screenshot of raw aligned reads (bam files) used to generate coverage plots and identify deviations from expected read depth consistent with copy number variants of a FKBP-V insertion (Project MS2757). The data identifies the founder as with on-target integration and without donor random integration (FIG. 17 and FIG. 18).

[0254] Three related models generated by sequential insertions from three rAAV donors were then analyzed for conditional expression of a full-length Per cDNA or the same Per cDNA with 54 bp and 432 bp deletions, respectively. For each model, only the third donor is unique. The longest insert of the series is 6.7 kb, and the founder rate was 2-7% HDR (Project XCC113, data not shown). With this set of samples, an alternative fragmentation method using Tn5 was tested, called tagmentation, to simultaneously fragmentate and barcode the DNA samples for convenient multiplexing. An average read length of 1 kb across samples was obtained, with maximum read lengths between 10-14 kb. The capture efficiency was 11-19%, with an on-target sequencing depth range across samples of 6K to 38K reads (data not shown). The 54 bp and 432 bp deletions are evident in respective samples (FIG. 4D). An increase in coverage for a portion of the wild type Per cassette implies concatenation of donor 3 (one of three donors used). Further analyses are shown below. Compared to Covaris g-TUBEs, enzymatic tagmentation is convenient and high throughput, with the downside of shorter fragment size, hence short read lengths. However, it is a useful method for quickly screening tens of samples.

### Various Undesired Modifications Detected Only by LOCK-Seq

[0255] Undesired edits among the samples at or away from the target sites were next analyzed more closely. The per-base read depth for M24, F19 and F21 suggests partial integration of the 3′ of mCherry and homology arms (FIG. 4B). Alignments of mapped reads to the mm39 mouse genome revealed a random integration event within the first intron of Cd63 (chr10: 128,743,596, mm39) and 5 kb upstream of neurotransmitter transporter Slc6a15 (chr10: 103,198,832) for M24 that were transmitted to F19 and F21, but not F20 (FIG. 5A). Both random integrations were confirmed by site-specific PCRs of the insertion junctions (FIG. 19(A-B)). A third random integration at a transcript with unknown function, 49305000H12Rik (chr16:73,129,317), was detected in Founder M24 but not identified in its progeny.

[0256] Of the three Per cDNA x3 rAAV models (Project XCC113), the variation in coverage across the cDNA cassette in the WT model proved to be a concatenated insertion event at the target site that was evident after de novo assembly of reads, despite the shorter average read length using Tn5 tagmentation (FIG. 5B). The concatenation was confirmed to be present only in the WT model by PCR (FIG. 20(A-C)). Besides concatenation, frequent internal deletions of one of the three SV40 polyA signal were also observed when screening 3-rAAV founders (FIG. 5C), which would be missed by junction PCRs. One-sided imprecise KIs were also observed, as in the case of a 3.5 kb reporter at the ROSA locus (Project MS2750) with insertions that could impact transgene expression (FIG. 5D).

[0257] The possible generation of technical artifacts, such as fusions reads that could falsely signal random integration of the donor, weas also explored. Such artifacts have previously been reported to occur in ˜2% of ONT data generated from amplicon sequencing, despite each amplicon being generated in single-plex reactions. In this case, a single run consisting of samples from different projects, where each project has unique sequence elements knocked-in should not contain any fusion reads between the two unique sequence elements. Two MinION runs were analyzed, each with multiple samples from two different projects that were carried through the LOCK-seq protocol that included fragmentation, barcoding, hybridization, ONT library prep, and ONT sequencing. For each MinION run analyzed, fusion or split reads where one read aligned to both unique insertion events were counted across samples (SEQ ID NO: 1003-1006). <2% fusion artifacts were found (FIG. 21(A-B)).

### Flexible and Cost-Effective Probe Generation

[0258] The biotinylated 120-mer oligo probes are costly, especially when used to te across the genomic region. To help reduce cost, amplicons spaced ˜300 bp apart along the genomic region and primers with universal tails were designed to create probe templates for a second, asymmetric PCR with biotinylated primer that anneals to the universal tail, resulting in low density tiling across the region of interest (FIG. 6A). The pooled and cleaned up asymmetric PCR reactions are now a probe set sufficient for hundreds of hybridizations. As shown at the bottom of FIG. 6A, four probes ranging from 140-270 bp were tiled across 1.3 kb region with 300 bp or greater spacing for LOCK-seq on samples for Project MS2826 (data not shown). Good uniformity of coverage across all samples was obtained, achieving 55× coverage for 99% of bases and x coverage for >90% (FIG. 6(B-E)). Using this small panel, average read lengths were 2-4 kb across samples with a range of 2.5-17K mapped reads and capture efficiency of 10-20%. Given that a MinION (R10.4.1) flow cell outputs 30-50 Gb of data, which averages about M total 5-10 kb reads per run, one could multiplex 100 samples to achieve about 1000 reads per sample at a 10% capture efficiency.

TABLE 1
LOCK-seq using PCR generated probes significantly reduce cost while facilitating design flexibility. Comparison
of probe cost with nCATS (synthetic gRNA and Cas9 protein RNPs, use if 2-4 RNPs per target locus) with
LOCK-seq probes that are commercially synthesized or generated in-house through asymmetric PCR.

| Feature | nCATS (Cas9 RNP-based) | LOCK-seq (Probe-based capture) |
|---|---|---|
| Capture Mechanism | Cas9/gRNA RNPs bind and | Biotinylated DNA probes hybridize to target; captured |
| | cleave dephosphorylated | fragments amplified via adapter-specific primers |
| | genomic DNA to release | |
| | regions of interest | |
| Sequencing Platform | ONT long-read | ONT long-read |
| Multiplexing Capacity | Low (1-3 samples per | High (≤100 samples on a MinION at ~1000x coverage |
| | MinION) | for 5-10 kb read lengths) |
| Versatility of Design | Constrained by PAM | High flexibility; probes can be placed anywhere (Insert, |
| | sequences; multiple pairs | HA, ITR, flanks), unconstrained by PAM |
| | of RNPs to improve | |
| | efficiency | |
| Capture Efficiency | ~1% | ≥10%, enables deep coverage at target locus |
| Number of Reactions | ~20 reactions (2 nmol | Commercial panels: ~16 captures Asymmetric PCR in- |
| | gRNA stock) | house: hundreds of captures possible |
| DNA Input Requirement | 1-5 μg genomic DNA | ~250 ng genomic DNA |
| Cost per 20 kb Target | ~$500 (Cas9 protein + | Commercial probes: ~$1000 (120-mer biotinylated |
| Locus | synthetic gRNAs; 4 RNPs | ssDNA panel, ~120 probes tiled at 30 bp spacing) |
| | per locus) | Asymmetric PCR in-house: ~$200 (average 250 bp |
| | | amplicons, ~70 probes tiled at 30 bp spacing) |

[0259] Compared to Cas9-based enrichment, probe capture using asymmetric PCR probes is substantially more cost-effective and scalable. nCATS requires custom gRNAs and Cas9 RNPs for each locus, typically limited to 2-4 RNPs per site, which constrains coverage, results in low capture efficiency, and cannot be multiplexed across many samples. In contrast, asymmetric PCR probes can be generated in-house at very low cost, with the ability to generated sufficient yields for hundreds of hybridizations. Probe length can be tuned (e.g., 120-300 nt or longer) depending on design needs, providing flexibility not available with commercial ssDNA biotinylated probes. Across five distinct donor targets using different gDNA mouse preps, the read length was highly reproducible at 4.5 kb for reads in the upper quartile as was an enhanced on-target coverage of 1×10⁴-1×10⁵ reads (data not shown). In these cases, the hundreds of reads in the upper quartile of read length exceed the length of the donor used, producing single reads that traverse the entire region of interest. This adds a high level of support that the on-target knock-in sequence is contiguous with the genomic-specific flanking sequence, and therefore not an artifact of assembly. Additionally, this high on-target coverage enables multiplexing of dozens to over 100 samples in a single run, dramatically reducing per-sample costs while increasing throughput.

rAAV Approach is Successful in Cancer and Stem Cell Lines

[0260] Like mouse KI models, large insertions are sometimes required for cell line models. The same strategy was applied to engineer cancer and stem cell lines, including those that are too sensitive to plasmid DNA to survive transfection, such as mouse BV2 microglial cell line. It was found that rAAV added immediately after RNP nucleofection was 30-fold more efficient than a donor plasmid for inserting a cDNA-GFP into iPSC cells, measured for GFP by FACS a week after nucleofection (FIG. 22A), and confirmed by junction PCR in single cell clones (FIG. 22B). BV2 cells are highly sensitive to exogenous DNA and show low efficiency HDR when using ssODNs. A side-by-side comparison of ssODN-mediated KI in BV2 and N2a cells showed comparable gRNA activity in both cell lines but drastically different HDR rates, from barely detectable in BV2 cells to 10-30% HDR in N2a cells (FIG. 7A). Likewise, plasmid DNA transfections often lead to nearly no survival of BV2 cells and undetectable HDR, making large cassette KI impossible to obtain. In contrast, BV2 was targeted with three 3-AAV sequential donors used for mouse projects to KI >6 kb and obtained >10% junction positive single-cell derived clones across all 3-AAV targeting projects (FIGS. 7B and 23(A-C)).

Detectable Recombination Between rAAV Donors

[0261] Above it was demonstrated that each double strand break generated by a Cas9/sgRNA cleavage of the chromosome mediates one HDR event, and the cleavage/HDR combination can go up to three times, achieving sequential rAAV-based KI. Single-stranded rAAV genome carrying a gRNA target site is not cleavable until KI occurs and the target site becomes double stranded, orchestrating the order of HDR events (FIG. 24(A-B)). Whether additional double-stranded breaks are needed for the second and/or third insertion events was next determined. In the absence of the second CRISPR/Cas9 complex, there is no double-strand break at the knock-in site after the first knock-in. It would require an interaction between donor 1 and 2, through inter-molecular recombination for example, to bypass the need of two independent HDR events for each half of the full-length composite sequence. Using two AAV donors, project XCD47c, to KI EF1a-Cre-ERT-T2A-luciferase-bGH pA signal, with or without the second RNP in HEK293T cells and iPSCs, was tested. Surprisingly, precise KI can occur at the target site with both donors without the need of a second double-stranded break, but much less efficiently (FIG. 25(A-D)). The percentage of junction PCR positive clones for all junctions is 3-fold higher with two gRNAs in HEK293T and 5-fold higher in iPSC cells.

### LOCK-Seq on Cell Lysates for Quick, First-Round Clonal Screen

[0262] Multiplexing and using crude extract and low cell numbers were also tested, which would not be possible using the nCATS. 59 iPSC clones were screened on a single MinION flow cell using Tn5 for tagmentation of crude extract captured using commercial probes and the same nine positive hits were identified by junction PCRs, demonstrating in principle that LOCK-seq is a practical method for initial clonal screening (FIG. 26(A-D)).

### Optimization of Probe Design and Production for Better Capture Efficiency

[0263] Probe design was further optimized to further improve capture efficiency by testing eight different probe designs in parallel (FIG. 27A). In theory, using probes that hybridize both strands could improve capture by enabling hybridization to both DNA strands with equal efficiency. To test this, a top-stranded probe design was compared to alternating top/bottom and double-stranded probe configurations (Groups A-C, FIG. 27B). All probe sets were 125 nt in length with 20 bp spacing between probes. Unexpectedly, the top-stranded probe design yielded the highest capture efficiency and coverage, outperforming both alternating and double-stranded designs by 1.4- and 3-fold in two different projects, respectively (FIG. 27(C-F)).

[0264] Three additional parameters affecting capture efficiency were also examined: (1) increasing the spacing between 125 nt top-stranded probes (Groups D and E, FIG. 27B), (2) extending probe length to 500 nt or 1,000 nt while maintaining 20 bp spacing (Groups F and G, FIG. 27B), and (3) additional biotin moieties (Group H, FIG. 27B). Increasing the probe spacing to 500 bp or 1,000 bp decreased performance, reducing capture efficiency by over twofold. Longer probes produced mixed results-decreasing capture for one target while improving it for another. However, increasing the biotin marks along the probe markedly improve capture efficiency for one target (6.7×) while modestly improving efficiency for the other (FIGS. 27(C and D)). Notably, probes with additional biotin moieties outperformed other designs in achieving improved coverage across GC-rich regions (FIG. 27(E-H)). The overall length distribution of mapped reads was minimally affected by the parameters tested (FIGS. 27(I and J)). However, when examining the longest top 10% of reads across conditions, probes more heavily modified with biotin skewed toward shorter reads (FIGS. 27(K and L)). The results support that the 125-nt probes at 20 bp spacing on the same strand with additional biotin moieties result in the best overall capture and coverage. For particularly GC-rich targets (>70%, >50 bp stretches), moderate addition of biotin during probe synthesis can improve coverage with the caveat of a slight shift towards shorter reads. The improved capture efficiency and coverage by using optimized probe design will allow higher levels of multiplexity and further reduce costs.

### Discussion

[0265] Multi-kilobase KIs are critical for the generation of various types of mouse and cell line models, such as reporter lines, humanization, gene replacement, inducible overexpression and conditional KI. The use of rAAV donors for editing single cell embryos eliminates the need for microinjection when coupled with RNP electroporation. As importantly, both birth rate and founder rate are greatly improved. The caveat is the size limit of cargo to 4.7 kb including homology arms and ITRs, leaving maximum insert to be below 4 kb, which as demonstrated herein, can be overcome by consecutive insertions of two or three rAAV donors.

[0266] >100 mouse models were generated using 1-, 2- or 3-rAAV donors in one step to deliver inserts up to over 6.6 kb in size. The most significant correlation is between KI efficiency and insert/homology length with one rAAV (FIG. 2D). Previous work using plasmid donors supports a positive correlation between length of homology arms and HDR, with efficiency plateaus achieved at 1-2 kb, but the most marked effect is the poor performance of shorter arms (100-500 bp) that are <0.5 in insert/total homology, lowering HDR rates by half or more when compared to longer arms. The homology arm length requirement further limits the insert size to around 3 kb. When more than one rAAV donor is used, donor 1 and/or donor 2 each bring in an additional gRNA site for recutting upon integration (FIG. 3A). Efficiency was related to insert size, with efficiency decreasing as insert size increased. Nonetheless, most projects only required two mouse sessions to complete (˜200-300 embryos).

[0267] Even though overall excellent efficiencies were achieved, it is not failproof with two sessions to obtain founders for a given model. Sufficient homology length to insert size correlates positively to better efficiency. Additional contributing variables can include purity and accuracy of titer of AAV preps, gRNA cutting efficiency, sequence context at target site, variation in manipulation of the embryos during a given session, etc., or any combinations of the above. For example, among the failed projects using one or two donors, each had a project that the donor differed only by a point mutation from the one that worked well, likely because of either rAAV quality/titer and/or arbitrary issues during the mouse session. Additionally, almost all multi-donor projects target the ROSA26 locus with very similar lengths of homology arms (˜800 bp each), yet the founder rate varies from 0-70%. Specifically, two of eight projects shared the same donor 1 and homology arms for donor 2 failed, yet the other six had founder rates ranging from 7.5% to 20%. Using multiple rAAV donors, titering by qPCR does not always reflect the actual viral concentration that can efficiently enter the nucleus to act as repair templates. Given the sequential nature of multiple insertion events, relative titer accuracy may be a leading contributing factor to variance in targeting efficiency.

[0268] The same rAAV strategy worked in iPSCs and cancer cell lines. Even though plasmid donors can be nucleofected, and editing is achievable, low survival post nucleofection and low targeting efficiency were often observed. In contrast, project XCB910b used a single rAAV to insert a GFP tag at the AAVS1 site, and showed a 10-fold increase in targeting efficiency compared to plasmid donor (FIG. 22(A-B)).

[0269] As importantly, in cells like BV2 and T cells, where exogenous DNA is cytotoxic, rAAV donors make a drastic difference. Using three rAAV donors, BV2 can be edited to have 6.7 kb large insertion (FIGS. 7(A-B) and 23(A-C)). And XCD47c, using two rAAV donors, reached about 14% positive clones in HEK293 cells and iPSCs (FIGS. 24(A-B) and 25(A-D)), compared to using a plasmid donor at less than 1%. Sequential insertion with AAV requires smaller plasmid constructs that are generally easier to synthesize than a single plasmid donor. Intermolecular recombination between monomeric circularized rAAV genomes have been reported as intermediate products that contribute to episomal persistence in muscle tissue, and rAAV genome concatenation is hypothesized to precede integration into the host genome. Homology between rAAV genomes is suggested to mediate intermolecular concatenation via base pairing between ITRs, which account for the head-to-tail configuration of episomal rAAV genomes reported in liver and skeletal muscle. Interestingly, when the second gRNA was left out in nucleofection of XCD47c, positive junctions were obtained in three out of 72 clones in HEK293 cells, compared to 10 out 75 with both gRNAs, implying the possibility of recombination between rAAV donors happens before HDR at the endogenous locus. The same targeting in iPSCs produced junction positive clones with both gRNAs, and without the second gRNA. Recent findings show that rAAV genome concatenation can bridge cis-acting transcriptional modifiers to rAAV expression cassettes delivered in trans, with nuclear concatemer formation detectable as early as 12 hours post-transduction. These concatamers may undergo further processing, providing a template for precise knock-in at a lower efficiency.

[0270] Genotyping becomes increasingly challenging with increasing insert size by junction PCRs, using one primer annealing to the target locus outside of a homology arm and the other in the insert to ensure site-specific insertion. Overlapping junction amplicons are more diagnostic but quickly become several kb in length with large inserts. Furthermore, multiple pairs of junction PCRs are necessary with sequential insertions for genotyping (FIG. 12(A-G)) and to confirm the final insert, yet some target sites and/or inserts are difficult to PCR amplify, and positive junctions do not guarantee the two junctions were amplified from the same allele, i.e. partial insertions can lead to false positives. Additionally, CRISPR-mediated targeted integration processes can introduce undesired by-products, such as random integration of donor templates, homology-independent insertion in full or partially into off-target cleavage sites, on-target large deletions and potentially chromosomal translocations, none of which can be detected by junction PCRs. Genotyping can be a time and resource-consuming obstacle for establishing sophisticated research models and potentially skewing data obtained if genotyping is inaccurate.

[0271] Cost-effective, high-throughput LOCK-seq was developed to not only screen for accurate KI allele but also detect large indels and donor random integration, providing comprehensive characterization of the genome. By using less than 1 μg of genomic DNA per sample, clonal cell populations and founder animals with different edits can be multiplexed for screening. This can be achieved with biotinylated oligo probes or probes synthesized via a two-step PCR process and loaded into the same MinION flow cell, which typically produces 20-30 Gb of total output and up to thousands of reads per sample. Although some regions may have lower sequencing depth due to secondary structure, sequence context, and probe performance, the method provides reliable and fast results with an average turnaround of under a week. This enables quick identification of knock-in clones and founder animals, thus minimizing culture time and animal husbandry costs.

[0272] LOCK-seq significantly reduces per sample cost compared to nCATS and related methods for three main reasons. First, LOCK-seq libraries result in more productive sequencing events on the MinION than those of nCATS. nCATS is amplification-free and relies on CRISPR/Cas9 to bind and expose the DNA ends of select loci for ligation of the motor protein required for ONT sequencing. It is hypothesized that even though the majority of DNA loaded on the flow cell is not competent for sequencing, it can transiently interact with pores or adapter ligated molecules, interfering with sequencing. On the other hand, LOCK-seq achieves greater than 10-fold increase in capture efficiency via hybridization-mediated target enrichment and higher output per flow cell with significantly more efficient ligation between the PCR amplicons of enriched sequences and the motor protein to result in greater than 100 folder increase in coverage than nCATS. Second, LOCK-seq enables low cost and flexible probe generation. Custom synthetic oligo probes labeled with 5′ end biotin were first used, which is pricy. It was then shown that probes generated by asymmetric PCR are versatile and efficient. Panels of 5-10 asymmetric PCR probes (<500 bp in length, 5′ biotinylated, spaced ˜20 bp apart along the flanking genomic regions, homology arms and the insert) can be produced in under an hour. Each set of asymmetric PCRs generates enough probes for hundreds of hybridizations. In contrast, nCATS and related methods require one or more gRNAs that are specific to the target (Table 1). To further improve capture efficiency, we tested different probe length, density, strand distribution and with additional biotin-modified bases incorporated (FIG. 21(A-B)). The data shows that probes of 125 nt, with 20 bp spacing on the same strand with additional biotin-modified internal bases resulted in the highest capture efficiency with minimal increase in probe costs. The preference for probes designed against the same strand may imply the impact of probe density, whereas more than one biotin/streptavidin interaction/probe seems to be needed for maximal capture of multi-kilobase DNA molecules. There is still room to further optimize probe design and production. Finally, fragmentation and barcoding are straightforward. Using Tn5 or Covaris g-TUBEs for fragmentation, barcodes can be ligated to the DNA to facilitate multiplexed target capture. Tn5 fragmentation typically yields post-hybridization reads of 1-2 kb, while Covaris g-TUBEs yield 4-6 kb-long reads, sufficient to obtain single contiguous reads with coverage across the entire transgene and its flanking genomic sequences. In cases where read lengths were shorter than the transgene size, assembly tools like Canu can be used to generate a high-quality consensus sequence, proving the presence of an insertion event, or lack thereof. Both Tn5 tagmentation and the Covaris g-TUBE fragmentation work for LOCK-seq. The latter only requires a one-minute centrifugation and yields longer fragment lengths, averaging around 10 kb. Tn5 tagmentation has higher throughput, is more suitable for an initial screen and can use cell lysates generated with Quick Extract instead of column-purified genomic DNA preparations (FIG. 26(A-D)). It was found that it is critical to use low cycle numbers for both PCR steps to achieve longer read length, 6-8 cycles for barcoding, and 16-18 cycles for post-hybridization PCR.

[0273] In addition to on-target insertion events, which can be precise or with imperfections (usually various sized deletions in the insert), LOCK-seq was used to identify concatenation of donors at the target site and random integrations of donors as well as genomic locations of the randomly inserted donors (FIG. 6(A-E)). Both random integration and concatenation of the donors potentially skew phenotypes of the cell or mouse models. Using LOCK-seq to screen and choose correct clones and founders are critical to the precision of the research models. LOCK-seq is agnostic to the format of donors used, and equal success has been achieved at genotyping models generated with plasmid donors. Further, the method should be readily adaptable to be used for genomic localization of transgenes created by various means, such as via lentiviral integration and transposition, and for detection and confirmation of genomic rearrangement events. The upper limit of insert size for reliable detection is currently at 10-20 kb.

[0274] The presence of artifacts due to fusion reads was explored and found to be <2%. The difference between artifacts and real fusion events is that real fusions have a distinct junction breakpoint that is supported by multiple independent reads, as opposed to artifacts which lack a consistent fusion junction breakpoint. When mapping to the whole genome, split reads will inevitably arise at low complexity sites, so unique sequence elements were used as anchors when mapping, ensuring that multiple independent reads traverse these regions. This increases confidence when curating the data. Critically, PCR is followed-up with to confirm putative off-target sites identified from LOCK-seq are not sequencing artifacts.

[0275] Nucleases potentially have off-target activities, which are not fully understood or well predicted, possibly leading to additional insertion of the donor template, with or without relying on homology. Using LOCK-seq, recurring random insertion sites among different founders and clones are likely to be off target sites, instead of truly “random”. So far, potential off-targeting cleavage-mediated insertion sites have not been detected in either mice or cell lines.

[0276] It has been demonstrated that LOCK-seq works well to characterize the post-edit genome. Yet several limitations of LOCK-seq exist. First, the need for two rounds of low-cycle PCRs restricts read length (FIG. 14A) and renders LOCK-seq to be more susceptible to coverage dropouts in GC-rich regions, which can be partially overcome by incorporation of more biotinylated bases in the probe (FIG. 27(A-L)). nCATS, on the other hand, is PCR-free, has longer read length and preserves methylation readout. With the current conditions described herein, read lengths of 4-6 kb on average were obtained, which limits the chance to obtain individual reads spanning from the genomic region outside one homology arm, across large inserts, especially with concatemers, to the genomic region outside of the other homology arm. Optimization of fragmentation methods, PCR conditions and probe design can yield and enrich longer fragments more efficiently. Additionally, it is difficult to apply this method to a transfected pool shortly after transfection, given the abundance of rAAV genome or plasmid donor, compared to the copy number of genomic targets. Finally, analysis of undesired events requires manual curation. A more automated pipeline is currently being developed to facilitate analysis. Even though the advantages of LOCK-seq compensate for these limitations enough to make it a powerful method, further improvements can enable LOCK-seq to be even more valuable.

[0277] In conclusion, it is shown that large, multi-kilobase KIs can be achieved efficiently in mouse embryos and cell lines via HDR using more than one rAAV donor and CRISPR/Cas9, and LOCK-seq reliably verifies on-target, precise KIs and identifies undesired partial Kis, donor concatenation and random integrations, enabling accurate selection of founders and clones to ensure model precision. Finally, LOCK-seq can also be used for genomic localization of transgenes created by various means, such as via lentiviral integration and transposition, and for detection and confirmation of genomic rearrangement events.

The application's sequence listing, which the Patent Office published only in electronic form, follows.

SEQUENCE LISTING (1006 sequences)

SEQ ID NO: 1 - DNA, 141 bp, synthetic construct
  source 1..141: mol_type = other DNA
cctgcaggcagctgcgcgctcgctcgctcactgaggccgcccgggcaaagcccgggcgtcgggcgacctttggtcgcccggcctcagtgagcgagcgagcgcgcagagagggagtggccaactccatcactaggggttcct

SEQ ID NO: 2 - DNA, 130 bp, synthetic construct
  source 1..130: mol_type = other DNA
aggaacccctagtgatggagttggccactccctctctgcgcgctcgctcgctcactgaggccgggcgaccaaaggtcgcccgacgcccgggcggcctcagtgagcgagcgagcgcgcagctgcctgcagg

SEQ ID NO: 3 - DNA, 32 bp, synthetic construct
  source 1..32: mol_type = other DNA
cactctttccctacacgacgctcttccgatct

SEQ ID NO: 4 - DNA, 34 bp, synthetic construct
  source 1..34: mol_type = other DNA
gtgactggagttcagacgtgtgctcttccgatct

SEQ ID NO: 5 - DNA, 20 bp, synthetic construct
  source 1..20: mol_type = other DNA
tggccaactccatcactagg

SEQ ID NO: 6 - DNA, 20 bp, synthetic construct
  source 1..20: mol_type = other DNA
taagggagctgcagtggagt

SEQ ID NO: 7 - DNA, 20 bp, synthetic construct
  source 1..20: mol_type = other DNA
ggatttagccacatccatag

SEQ ID NO: 8 - DNA, 33 bp, synthetic construct
  source 1..33: mol_type = other DNA
tcgtcggcagcgtcagatgtgtataagagacag

SEQ ID NO: 9 - DNA, 34 bp, synthetic construct
  source 1..34: mol_type = other DNA
gtctcgtgggctcggagatgtgtataagagacag

SEQ ID NO: 10 - DNA, 19 bp, synthetic construct
  source 1..19: mol_type = other DNA
ctgtctcttatacacatct

SEQ ID NO: 11 - DNA, 32 bp, synthetic construct; identical to SEQ ID NO: 3
  source 1..32: mol_type = other DNA

SEQ ID NO: 12 - DNA, 34 bp, synthetic construct; identical to SEQ ID NO: 4
  source 1..34: mol_type = other DNA

SEQ ID NO: 13 - DNA, 32 bp, synthetic construct; identical to SEQ ID NO: 3
  source 1..32: mol_type = other DNA

SEQ ID NO: 14 - DNA, 34 bp, synthetic construct; identical to SEQ ID NO: 4
  source 1..34: mol_type = other DNA

SEQ ID NO: 15 - DNA, 20 bp, synthetic construct
  source 1..20: mol_type = other DNA
agtcaggtgcccaatgtacc

SEQ ID NO: 16 - DNA, 19 bp, synthetic construct
  source 1..19: mol_type = other DNA
taggcagttcgctccaagc

SEQ ID NO: 17 - DNA, 23 bp, Synthetic Construct
  misc_feature 21: note = n is a, c, g, t or u
  source 1..23: mol_type = other DNA
gttggaggcagactttatgcngg

SEQ ID NO: 18 - DNA, 23 bp, synthetic construct
  misc_feature 21: note = n is a, c, g, t or u
  source 1..23: mol_type = other DNA
cctggaagccacaagcaatgngg

SEQ ID NO: 19 - DNA, 23 bp, synthetic construct
  misc_feature 21: note = n is a, c, g, t or u
  source 1..23: mol_type = other DNA
ctaaaacgagccgttgcattngg

SEQ ID NO: 20 - DNA, 23 bp, synthetic construct
  misc_feature 21: note = n is a, c, g, t or u
  source 1..23: mol_type = other DNA
agtccaaggctgctggaacangg

SEQ ID NO: 21 - DNA, 23 bp, synthetic construct
  misc_feature 21: note = n is a, c, g, t or u
  source 1..23: mol_type = other DNA
tcaccatcctcccgtccatgngg

SEQ ID NO: 22 - DNA, 23 bp, synthetic construct
  source 1..23: mol_type = other DNA
tgacagaactctgtcaaagcagg

SEQ ID NO: 23 - DNA, 23 bp, synthetic construct
  misc_feature 21: note = n is a, c, g, t or u
  source 1..23: mol_type = other DNA
cttcatcatggtgcagtcccngg

SEQ ID NO: 24 - DNA, 23 bp, synthetic construct
  misc_feature 21: note = n is a, c, g, t or u
  source 1..23: mol_type = other DNA
acatggtggaacagatttgangg

SEQ ID NO: 25 - DNA, 23 bp, synthetic construct
  misc_feature 21: note = n is a, c, g, t or u
  source 1..23: mol_type = other DNA
agcaccaggaaccatgtcccngg

SEQ ID NO: 26 - DNA, 23 bp, synthetic construct
  misc_feature 21: note = n is a, c, g, t or u
  source 1..23: mol_type = other DNA
agcaccaggaaccatgtcccngg

SEQ ID NO: 27 - DNA, 23 bp, synthetic construct
  misc_feature 21: note = n is a, c, g, t or u
  source 1..23: mol_type = other DNA
tcattgacataccatagaccngg

SEQ ID NO: 28 - DNA, 23 bp, synthetic construct
  misc_feature 21: note = n is a, c, g, t or u
  source 1..23: mol_type = other DNA
ttagctcttgaagctcctccngg

SEQ ID NO: 29 - DNA, 23 bp, synthetic construct
  source 1..23: mol_type = other DNA
gaaggcacagtcgaggctgcagg

SEQ ID NO: 30 - DNA, 23 bp, synthetic construct
  source 1..23: mol_type = other DNA
gcacagaggcatgagactcgagg

SEQ ID NO: 31 - DNA, 23 bp, synthetic construct
  misc_feature 21: note = n is a, c, g, t or u
  source 1..23: mol_type = other DNA
ttgcatgatgcagcagcttcngg

SEQ ID NO: 32 - DNA, 23 bp, synthetic construct
  source 1..23: mol_type = other DNA
actcacactgatcggttccatgg

SEQ ID NO: 33 - DNA, 23 bp, synthetic construct
  misc_feature 21: note = n is a, c, g, t or u
  source 1..23: mol_type = other DNA
gaggagaagtctcatggctgngg

SEQ ID NO: 34 - DNA, 23 bp, synthetic construct
  misc_feature 21: note = n is a, c, g, t or u
  source 1..23: mol_type = other DNA
tgggctagccgagtcgacccngg

SEQ ID NO: 35 - DNA, 23 bp, synthetic construct
  source 1..23: mol_type = other DNA
ccactagaggagctgtgtccagg

SEQ ID NO: 36 - DNA, 23 bp, synthetic construct
  source 1..23: mol_type = other DNA
ctggcttccgaggggaactatgg

SEQ ID NO: 37 - DNA, 23 bp, synthetic construct
  misc_feature 21: note = n is a, c, g, t or u
  source 1..23: mol_type = other DNA
aggctggattgactcctggcngg

SEQ ID NO: 38 - DNA, 23 bp, synthetic construct
  misc_feature 21: note = n is a, c, g, t or u
  source 1..23: mol_type = other DNA
caagagaagcagaggatggcngg

SEQ ID NO: 39 - DNA, 23 bp, synthetic construct
  misc_feature 21: note = n is a, c, g, t or u
  source 1..23: mol_type = other DNA
ggagctggtggtggcgtctcngg

SEQ ID NO: 40 - DNA, 23 bp, synthetic construct
  misc_feature 21: note = n is a, c, g, t or u
  source 1..23: mol_type = other DNA
ctttgtgctctcgtgttacangg

SEQ ID NO: 41 - DNA, 23 bp, synthetic construct
  misc_feature 21: note = n is a, c, g, t or u
  source 1..23: mol_type = other DNA
caacagcttcttcaggctttngg

SEQ ID NO: 42 - DNA, 23 bp, synthetic construct
  misc_feature 21: note = n is a, c, g, t or u
  source 1..23: mol_type = other DNA
tcacaaaggatgaatcagtangg

SEQ ID NO: 43 - DNA, 23 bp, synthetic construct
  misc_feature 21: note = n is a, c, g, t or u
  source 1..23: mol_type = other DNA
ggattttgaaagcaacctccngg

SEQ ID NO: 44 - DNA, 23 bp, synthetic construct
  source 1..23: mol_type = other DNA
gacgagctgtacaagtaaagcgg

SEQ ID NO: 45 - DNA, 23 bp, synthetic construct
  misc_feature 21: note = n is a, c, g, t or u
  source 1..23: mol_type = other DNA
aagtctcgagtttcttatccngg

SEQ ID NO: 46 - DNA, 23 bp, synthetic construct
  misc_feature 21: note = n is a, c, g, t or u
  source 1..23: mol_type = other DNA
acaaggtcagcagtagcaggngg

SEQ ID NO: 47 - DNA, 23 bp, synthetic construct
  source 1..23: mol_type = other DNA
acagctcgtccatgccgtacagg

SEQ ID NO: 48 - DNA, 23 bp, synthetic construct
  source 1..23: mol_type = other DNA
acagctcgtccatgccgtacagg

SEQ ID NO: 49 - DNA, 23 bp, synthetic construct
  misc_feature 21: note = n is a, c, g, t or u
  source 1..23: mol_type = other DNA
catgaagacaatttcattggngg

SEQ ID NO: 50 - DNA, 23 bp, synthetic construct
  misc_feature 21: note = n is a, c, g, t or u
  source 1..23: mol_type = other DNA
tgaaaatcttaaggatccatngg

SEQ ID NO: 51 - DNA, 23 bp, synthetic construct
  misc_feature 21: note = n is a, c, g, t or u
  source 1..23: mol_type = other DNA
tgaaaatcttaaggatccatngg

SEQ ID NO: 52 - DNA, 23 bp, synthetic construct
  misc_feature 21: note = n is a, c, g, t or u
  source 1..23: mol_type = other DNA
tcttacagatatgggagacangg

SEQ ID NO: 53 - DNA, 23 bp, synthetic construct
  misc_feature 21: note = n is a, c, g, t or u
  source 1..23: mol_type = other DNA
acatcaacgcctcgggctagngg

SEQ ID NO: 54 - DNA, 23 bp, synthetic construct
  misc_feature 21: note = n is a, c, g, t or u
  source 1..23: mol_type = other DNA
gcaaaggccgctgctttgaangg

SEQ ID NO: 55 - DNA, 23 bp, synthetic construct
  misc_feature 21: note = n is a, c, g, t or u
  source 1..23: mol_type = other DNA
gcagatgacgaagataattangg

SEQ ID NO: 56 - DNA, 23 bp, synthetic construct
  misc_feature 21: note = n is a, c, g, t or u
  source 1..23: mol_type = other DNA
tgtctgcgattgctggctaangg

SEQ ID NO: 57 - DNA, 23 bp, synthetic construct
  misc_feature 21: note = n is a, c, g, t or u
  source 1..23: mol_type = other DNA
ctgaaggggtgcagacatggngg

SEQ ID NO: 58 - DNA, 23 bp, synthetic construct
  misc_feature 21: note = n is a, c, g, t or u
  source 1..23: mol_type = other DNA
tcacagtaggaagattgcatngg

SEQ ID NO: 59 - DNA, 23 bp, synthetic construct
  misc_feature 21: note = n is a, c, g, t or u
  source 1..23: mol_type = other DNA
agggtaacacagtggtctgangg

SEQ ID NO: 60 - DNA, 23 bp, synthetic construct
  misc_feature 21: note = n is a, c, g, t or u
  source 1..23: mol_type = other DNA
cactgggagacgatgccaggngg

SEQ ID NO: 61 - DNA, 23 bp, synthetic construct
  source 1..23: mol_type = other DNA
gaaggcacagtcgaggctgcagg

SEQ ID NO: 62 - DNA, 23 bp, synthetic construct
  source 1..23: mol_type = other DNA
gaaggcacagtcgaggctgcagg

SEQ ID NO: 63 - DNA, 23 bp, synthetic construct
  source 1..23: mol_type = other DNA
gaaggcacagtcgaggctgcagg

SEQ ID NO: 64 - DNA, 23 bp, synthetic construct
  misc_feature 21: note = n is a, c, g, t or u
  source 1..23: mol_type = other DNA
ggatactcagtggagtggccngg

SEQ ID NO: 65 - DNA, 23 bp, synthetic construct
  misc_feature 21: note = n is a, c, g, t or u
  source 1..23: mol_type = other DNA
ccgcggcccatggagcccgcngg

SEQ ID NO: 66 - DNA, 23 bp, synthetic construct
  misc_feature 21: note = n is a, c, g, t or u
  source 1..23: mol_type = other DNA
tatgggtagttgcagtcagtngg

SEQ ID NO: 67 - DNA, 23 bp, synthetic construct
  misc_feature 21: note = n is a, c, g, t or u
  source 1..23: mol_type = other DNA
acaatgagcaacaaattcctngg

SEQ ID NO: 68 - DNA, 23 bp, synthetic construct
  source 1..23: mol_type = other DNA
gaagatgggcgggagtcttctgg

SEQ ID NO: 69 - DNA, 23 bp, synthetic construct
  misc_feature 21: note = n is a, c, g, t or u
  source 1..23: mol_type = other DNA
aaattgttctgtgtgaaagtngg

SEQ ID NO: 70 - DNA, 23 bp, synthetic construct
  source 1..23: mol_type = other DNA
gaagatgggcgggagtcttctgg

SEQ ID NO: 71 - DNA, 23 bp, synthetic construct
  source 1..23: mol_type = other DNA
gaagatgggcgggagtcttctgg

SEQ ID NO: 72 - DNA, 23 bp, synthetic construct
  misc_feature 21: note = n is a, c, g, t or u
  source 1..23: mol_type = other DNA
ttttattggccttctgcaccngg

SEQ ID NO: 73 - DNA, 23 bp, synthetic construct
  misc_feature 21: note = n is a, c, g, t or u
  source 1..23: mol_type = other DNA
ttttattggccttctgcaccngg

SEQ ID NO: 74 - DNA, 23 bp, synthetic construct
  misc_feature 21: note = n is a, c, g, t or u
  source 1..23: mol_type = other DNA
ctcccagatgaacaaccgaangg

SEQ ID NO: 75 - DNA, 23 bp, synthetic construct
  source 1..23: mol_type = other DNA
gaagatgggcgggagtcttctgg

SEQ ID NO: 76 - DNA, 23 bp, synthetic construct
  misc_feature 21: note = n is a, c, g, t or u
  source 1..23: mol_type = other DNA
cagctgatacctaactctccngg

SEQ ID NO: 77 - DNA, 23 bp, synthetic construct
  misc_feature 21: note = n is a, c, g, t or u
  source 1..23: mol_type = other DNA
actgaggccataacagagttngg

SEQ ID NO: 78 - DNA, 23 bp, synthetic construct
  source 1..23: mol_type = other DNA
gaagatgggcgggagtcttctgg

SEQ ID NO: 79 - DNA, 23 bp, synthetic construct
  misc_feature 21: note = n is a, c, g, t or u
  source 1..23: mol_type = other DNA
accagaagtttacaaggtccngg

SEQ ID NO: 80 - DNA, 23 bp, synthetic construct
  misc_feature 21: note = n is a, c, g, t or u
  source 1..23: mol_type = other DNA
aaaaaggcagcgtgatacctngg

SEQ ID NO: 81 - DNA, 23 bp, synthetic construct
  misc_feature 21: note = n is a, c, g, t or u
  source 1..23: mol_type = other DNA
tgtcacacagcatagacgcangg

SEQ ID NO: 82 - DNA, 23 bp, synthetic construct
  misc_feature 21: note = n is a, c, g, t or u
  source 1..23: mol_type = other DNA
tggagttgcgctcacacctgngg

SEQ ID NO: 83 - DNA, 23 bp, synthetic construct
  misc_feature 21: note = n is a, c, g, t or u
  source 1..23: mol_type = other DNA
cgtggtcccagttagcactgngg

SEQ ID NO: 84 - DNA, 23 bp, synthetic construct
  source 1..23: mol_type = other DNA
gaagatgggcgggagtcttctgg

SEQ ID NO: 85 - DNA, 23 bp, synthetic construct
  misc_feature 21: note = n is a, c, g, t or u
  source 1..23: mol_type = other DNA
gatcaaccgcatagcctcctngg

SEQ ID NO: 86 - DNA, 23 bp, synthetic construct
  misc_feature 21: note = n is a, c, g, t or u
  source 1..23: mol_type = other DNA
gtcgccggaggcgagcaatgngg

SEQ ID NO: 87 - DNA, 23 bp, synthetic construct
  misc_feature 21: note = n is a, c, g, t or u
  source 1..23: mol_type = other DNA
agcaaagttggccctcactgngg

SEQ ID NO: 88 - DNA, 23 bp, synthetic construct
  misc_feature 21: note = n is a, c, g, t or u
  source 1..23: mol_type = other DNA
aaggagccgcccgaccatgangg

SEQ ID NO: 89 - DNA, 23 bp, synthetic construct
  misc_feature 21: note = n is a, c, g, t or u
  source 1..23: mol_type = other DNA
tatatcagaattgaataatgngg

SEQ ID NO: 90 - DNA, 23 bp, synthetic construct
  misc_feature 21: note = n is a, c, g, t or u
  source 1..23: mol_type = other DNA
agtggctcagagactgtaaangg

SEQ ID NO: 91 - DNA, 23 bp, synthetic construct
  source 1..23: mol_type = other DNA
gaaggcacagtcgaggctgcagg

SEQ ID NO: 92 - DNA, 23 bp, synthetic construct
  misc_feature 21: note = n is a, c, g, t or u
  source 1..23: mol_type = other DNA
actttggtggaaagttaatgngg

SEQ ID NO: 93 - DNA, 23 bp, synthetic construct
  misc_feature 21: note = n is a, c, g, t or u
  source 1..23: mol_type = other DNA
ttgttgagccccaaggcaccngg

SEQ ID NO: 94 - DNA, 23 bp, synthetic construct
  misc_feature 21: note = n is a, c, g, t or u
  source 1..23: mol_type = other DNA
gcgtgtctgctgagacatcangg

SEQ ID NO: 95 - DNA, 23 bp, synthetic construct
  misc_feature 21: note = n is a, c, g, t or u
  source 1..23: mol_type = other DNA
tggcaaaggaaaggtgccatngg

SEQ ID NO: 96 - DNA, 23 bp, synthetic construct
  misc_feature 21: note = n is a, c, g, t or u
  source 1..23: mol_type = other DNA
ctagatcttcagaaagtgctngg

SEQ ID NO: 97 - DNA, 24 bp, synthetic construct
  misc_feature 21: note = n is a, c, g, t or u
  source 1..24: mol_type = other DNA
tcaggaacctcatggtaacangag

SEQ ID NO: 98 - DNA, 23 bp, synthetic construct
  source 1..23: mol_type = other DNA
gaaggcacagtcgaggctgcagg

SEQ ID NO: 99 - DNA, 23 bp, synthetic construct
  misc_feature 21: note = n is a, c, g, t or u
  source 1..23: mol_type = other DNA
tcatgagaagtaagtgaatgngg

SEQ ID NO: 100 - DNA, 23 bp, synthetic construct
  misc_feature 21: note = n is a, c, g, t or u
  source 1..23: mol_type = other DNA
aacaacgaaatctcagactcngg

SEQ ID NO: 101 - DNA, 23 bp, synthetic construct
  misc_feature 21: note = n is a, c, g, t or u
  source 1..23: mol_type = other DNA
gttatactacactgctatgcngg

SEQ ID NO: 102 - DNA, 23 bp, synthetic construct
  misc_feature 21: note = n is a, c, g, t or u
  source 1..23: mol_type = other DNA
gtggcagtactccactgactngg

SEQ ID NO: 103 - DNA, 23 bp, synthetic construct
  misc_feature 21: note = n is a, c, g, t or u
  source 1..23: mol_type = other DNA
ggcaggaggaacaagttcccngg

SEQ ID NO: 104 - DNA, 23 bp, synthetic construct
  source 1..23: mol_type = other DNA
gaaggcacagtcgaggctgcagg

SEQ ID NO: 105 - DNA, 23 bp, synthetic construct
  misc_feature 21: note = n is a, c, g, t or u
  source 1..23: mol_type = other DNA
aaactggtggagaggtcccangg

SEQ ID NO: 106 - DNA, 23 bp, synthetic construct
  misc_feature 21: note = n is a, c, g, t or u
  source 1..23: mol_type = other DNA
aaactggtggagaggtcccangg

SEQ ID NO: 107 - DNA, 23 bp, synthetic construct
  source 1..23: mol_type = other DNA
gaaggcacagtcgaggctgcagg

SEQ ID NO: 108 - DNA, 23 bp, synthetic construct
  misc_feature 21: note = n is a, c, g, t or u
  source 1..23: mol_type = other DNA
agttaagagattgagcagttngg

SEQ ID NO: 109 - DNA, 23 bp, synthetic construct
  misc_feature 21: note = n is a, c, g, t or u
  source 1..23: mol_type = other DNA
agctcatttgtgctccttggngg

SEQ ID NO: 110 - DNA, 23 bp, synthetic construct
  source 1..23: mol_type = other DNA
gaaggcacagtcgaggctgcagg

SEQ ID NO: 111 - DNA, 23 bp, synthetic construct
  misc_feature 21: note = n is a, c, g, t or u
  source 1..23: mol_type = other DNA
gataggctcgctgagcgccangg

SEQ ID NO: 112 - DNA, 23 bp, synthetic construct
  misc_feature 21: note = n is a, c, g, t or u
  source 1..23: mol_type = other DNA
gaggggctgtcaaagtgatcngg

SEQ ID NO: 113 - DNA, 23 bp, synthetic construct
  misc_feature 21: note = n is a, c, g, t or u
  source 1..23: mol_type = other DNA
tggtggcggtgaggatgactngg

SEQ ID NO: 114 - DNA, 23 bp, synthetic construct
  source 1..23: mol_type = other DNA
gaagatgggcgggagtcttctgg

SEQ ID NO: 115 - DNA, 23 bp, synthetic construct
  misc_feature 21: note = n is a, c, g, t or u
  source 1..23: mol_type = other DNA
ctaccactgtggtggacgttngg

SEQ ID NO: 116 - DNA, 23 bp, synthetic construct
  misc_feature 21: note = n is a, c, g, t or u
  source 1..23: mol_type = other DNA
cggagcaccacagtgctaacngg

SEQ ID NO: 117 - DNA, 23 bp, synthetic construct
  misc_feature 21: note = n is a, c, g, t or u
  source 1..23: mol_type = other DNA
cctcccacatctgtgtaagcngg

SEQ ID NO: 118 - DNA, 23 bp, synthetic construct
  misc_feature 21: note = n is a, c, g, t or u
  source 1..23: mol_type = other DNA
ccgagaattttgtaacagtcngg

SEQ ID NO: 119 - DNA, 23 bp, synthetic construct
  misc_feature 21: note = n is a, c, g, t or u
  source 1..23: mol_type = other DNA
gtgatatttcattgcttcacngg

SEQ ID NO: 120 - DNA, 23 bp, synthetic construct
  misc_feature 21: note = n is a, c, g, t or u
  source 1..23: mol_type = other DNA
cctacaggtgactagcaggcngg

SEQ ID NO: 121 - DNA, 23 bp, synthetic construct
  misc_feature 21: note = n is a, c, g, t or u
  source 1..23: mol_type = other DNA
ctgcagcaccgtggtgttgangg

SEQ ID NO: 122 - DNA, 23 bp, synthetic construct
  misc_feature 21: note = n is a, c, g, t or u
  source 1..23: mol_type = other DNA
agccaaaacaacagccccatngg

SEQ ID NO: 123 - DNA, 23 bp, synthetic construct
  misc_feature 21: note = n is a, c, g, t or u
  source 1..23: mol_type = other DNA
gtgtaagtatcccataccccngg

SEQ ID NO: 124 - DNA, 23 bp, synthetic construct
  misc_feature 21: note = n is a, c, g, t or u
  source 1..23: mol_type = other DNA
tcaccgtatccgtggcgattngg

SEQ ID NO: 125 - DNA, 23 bp, synthetic construct
  misc_feature 21: note = n is a, c, g, t or u
  source 1..23: mol_type = other DNA
tggtgtagggagtcgctagtngg

SEQ ID NO: 126 - DNA, 23 bp, synthetic construct
  misc_feature 21: note = n is a, c, g, t or u
  source 1..23: mol_type = other DNA
acttcttttgcttcatcagangg

SEQ ID NO: 127 - DNA, 23 bp, synthetic construct
  misc_feature 21: note = n is a, c, g, t or u
  source 1..23: mol_type = other DNA
acttcttttgcttcatcagangg

SEQ ID NO: 128 - DNA, 23 bp, synthetic construct
  misc_feature 21: note = n is a, c, g, t or u
  source 1..23: mol_type = other DNA
ccactgagccccaccatgggngg

SEQ ID NO: 129 - DNA, 23 bp, synthetic construct
  misc_feature 21: note = n is a, c, g, t or u
  source 1..23: mol_type = other DNA
cacgggttgaagccattgcangg

SEQ ID NO: 130 - DNA, 23 bp, synthetic construct
  misc_feature 21: note = n is a, c, g, t or u
  source 1..23: mol_type = other DNA
ctaccactgtggtggacgttngg

SEQ ID NO: 131 - DNA, 23 bp, synthetic construct
  source 1..23: mol_type = other DNA
gaagatgggcgggagtcttctgg

SEQ ID NO: 132 - DNA, 23 bp, synthetic construct
  misc_feature 21: note = n is a, c, g, t or u
  source 1..23: mol_type = other DNA
aatgtgacaagtgtccatccngg

SEQ ID NO: 133 - DNA, 23 bp, synthetic construct
  source 1..23: mol_type = other DNA
gaaggcacagtcgaggctgcagg

SEQ ID NO: 134 - DNA, 23 bp, synthetic construct
  source 1..23: mol_type = other DNA
gaagatgggcgggagtcttctgg

SEQ ID NO: 135 - DNA, 23 bp, synthetic construct
  source 1..23: mol_type = other DNA
gaagatgggcgggagtcttctgg

SEQ ID NO: 136 - DNA, 23 bp, synthetic construct
  source 1..23: mol_type = other DNA
gaagatgggcgggagtcttctgg

SEQ ID NO: 137 - DNA, 23 bp, synthetic construct
  source 1..23: mol_type = other DNA
gaaggcacagtcgaggctgcagg

SEQ ID NO: 138 - DNA, 23 bp, synthetic construct
  source 1..23: mol_type = other DNA
gaagatgggcgggagtcttctgg

SEQ ID NO: 139 - DNA, 23 bp, synthetic construct
  source 1..23: mol_type = other DNA
gaagatgggcgggagtcttctgg

SEQ ID NO: 140 - DNA, 23 bp, synthetic construct
  source 1..23: mol_type = other DNA
gaagatgggcgggagtcttctgg

SEQ ID NO: 141 - DNA, 23 bp, synthetic construct
  source 1..23: mol_type = other DNA
gaagatgggcgggagtcttctgg

SEQ ID NO: 142 - DNA, 23 bp, synthetic construct
  source 1..23: mol_type = other DNA
gaagatgggcgggagtcttctgg

SEQ ID NO: 143 - DNA, 23 bp, synthetic construct
  source 1..23: mol_type = other DNA
gaagatgggcgggagtcttctgg

SEQ ID NO: 144 - DNA, 23 bp, synthetic construct
  source 1..23: mol_type = other DNA
gaagatgggcgggagtcttctgg

SEQ ID NO: 145 - DNA, 23 bp, synthetic construct
  source 1..23: mol_type = other DNA
gaagatgggcgggagtcttctgg

SEQ ID NO: 146 - DNA, 23 bp, synthetic construct
  source 1..23: mol_type = other DNA
gaaggcacagtcgaggctgcagg

SEQ ID NO: 147 - DNA, 23 bp, synthetic construct
  source 1..23: mol_type = other DNA
gatgtgaacaaagcaccctatgg

SEQ ID NO: 148 - DNA, 23 bp, synthetic construct
  source 1..23: mol_type = other DNA
gaagatgggcgggagtcttctgg

SEQ ID NO: 149 - DNA, 23 bp, synthetic construct
  source 1..23: mol_type = other DNA
gaagatgggcgggagtcttctgg

SEQ ID NO: 150 - DNA, 23 bp, synthetic construct
  source 1..23: mol_type = other DNA
gaagatgggcgggagtcttctgg

SEQ ID NO: 151 - DNA, 23 bp, synthetic construct
  source 1..23: mol_type = other DNA
ggggccactagggacaggattgg

SEQ ID NO: 152 - DNA, 23 bp, synthetic construct
  misc_feature 21: note = n is a, c, g, t or u
  source 1..23: mol_type = other DNA
gtcctgtgcggccttgtattngg

SEQ ID NO: 153 - DNA, 23 bp, synthetic construct
  misc_feature 21: note = n is a, c, g, t or u
  source 1..23: mol_type = other DNA
atggtgctccaacacactgcngg

SEQ ID NO: 154 - DNA, 23 bp, synthetic construct
  misc_feature 21: note = n is a, c, g, t or u
  source 1..23: mol_type = other DNA
gagaagctccatgaccgcccngg

SEQ ID NO: 155 - DNA, 23 bp, synthetic construct
  misc_feature 21: note = n is a, c, g, t or u
  source 1..23: mol_type = other DNA
ctttgagaatgtggtggccangg

SEQ ID NO: 156 - DNA, 3114 bp, synthetic construct
  source 1..3114: mol_type = other DNA
ccttttgtggtcgatttttttgttgactgattttataacccaaataactaagtgaatctcctctttgtatttcttctggagcaatctatagcctccagtatggcagaattctttgtgtaaccttaaaagtactctttaaaatatctttgtcagaatcaggcaacaaaatgtcgataaataatagattgaagaaattccttgtgatttatttctaatggttgttacacaaaatactggcataaagttggactatttaacactccctgtggaagtacctttttaaatctctttagtgaatgattattattcaaagtagatctaaatctttttctcatgagaacactggtcactggactagtaataatgctaatctagtatgacctcattgtaacatacatgtgcaaagatccccattccaaaacagtcagttacaggttccagtaattagagtttgccatacattttaggagaggtcacaattcaactacaatcaccattaactgctgaattggatgatttagacctccttcattcaatatgtgtaaagaatgagctgagttttccccatcccactcataatattcttaatgggtgaagggaaggtgtacattcacaaacatcccaagcttcatctttagcacagtgcactagccctttctcatttgctgaatatgttttttgtccttctagtttcgaaactgcatcttacatctctttggaaagaaggttgatgatagctctgaactttccagcacctccaagacagaagtctcatctgtctcttcagtgtcacctgcaggaagcggagctactaacttcagcctgctgaagcaggctggagacgtggaggagaaccctggacctcccaagaagaagaggaaggtgatggtgagcaagggcgaggaggtcatcaaagagttcatgcgcttcaaggtgcgcatggagggctccatgaacggccacgagttcgagatcgagggcgagggcgagggccgcccctacgagggcacccagaccgccaagctgaaggtgaccaagggcggccccctgcccttcgcctgggacatcctgtccccccagttcatgtacggctccaaggcgtacgtgaagcaccccgccgacatccccgattacaagaagctgtccttccccgagggcttcaagtgggagcgcgtgatgaacttcgaggacggcggtctggtgaccgtgacccaggactcctccctgcaggacggcacgctgatctacaaggtgaagatgcgcggcaccaacttcccccccgacggccccgtaatgcagaagaagaccatgggctgggaggcctccaccgagcgcctgtacccccgcgacggcgtgctgaagggcgagatccaccaggccctgaagctgaaggacggcggccactacctggtggagttcaagaccatctacatggccaagaagcccgtgcaactgcccggctactactacgtggacaccaagctggacatcacctcccacaacgaggactacaccatcgtggaacagtacgagcgctccgagggccgccaccacctgttcctggggcatggcaccggcagcaccggcagcggcagctccggcaccgcctcctccgaggacaacaacatggccgtcatcaaagagttcatgcgcttcaaggtgcgcatggagggctccatgaacggccacgagttcgagatcgagggcgagggcgagggccgcccctacgagggcacccagaccgccaagctgaaggtgaccaagggcggccccctgcccttcgcctgggacatcctgtccccccagttcatgtacggctccaaggcgtacgtgaagcaccccgccgacatccccgattacaagaagctgtccttccccgagggcttcaagtgggagcgcgtgatgaacttcgaggacggcggtctggtgaccgtgacccaggactcctccctgcaggacggcacgctgatctacaaggtgaagatgcgcggcaccaacttcccccccgacggccccgtaatgcagaagaagaccatgggctgggaggcctccaccgagcgcctgtacccccgcgacggcgtgctgaagggcgagatccaccaggccctgaagctgaaggacggcggccactacctggtggagttcaagaccatctacatggccaagaagcccgtgcaactgcccggctactactacgtggacaccaagctggacatcacctcccacaacgaggactacaccatcgtggaacagtacgagcgctccgagggccgccaccacctgttcctgtacggcatggacgagctgtacaagtagtaaagtctgcctccaacctgtcccatccatcaaagctttggccatgttttacctcccttctcatctatccttgtaaaataaacataatttctccttgctcaaaccaaccaagtcccagagatgtctgtaatgtgaggttatctaagctgctgggtgttctggaaccagacctggagggaatacagtgtaggcaaagacaccagaacatatgtggggtttttttttccacttttaatccagtccctgtgtctgtagatattatgaaaagagcatggaaaactggaaggagaaggcaagttggcatctgcaatgtatctcactgggcttgcagttacagaattaagaaaatgagagcaacaaagtagcttactaaagaggtcttactggatgccctcaacaactgaaaggaagaaattcgggtgaatggcacttcttgcccctcagtgtccatctgatggaggcttagcatcctttaagtcttgtctccacttaaaggggacccaggcctgccagtcaataatagagatgacatggcgcttctgccaggccaaagtcccaagcccaatgatcataaatacaatgaagatgcgcaggcgtgagctgagcaagggcaaggggcaagaacacaatgtagagaccacgaccaagaggatagtggtcagagtgagaagcaggcttatgaatctgaacaaaaagtccttgggacgggttctgaggctggccatcatctccagttgggtagcttgctgtagagtttctagcttggttattctgctcttgaaaatctccattacatcc

SEQ ID NO: 157 - DNA, 3448 bp, synthetic construct
  source 1..3448: mol_type = other DNA
ctctgtctctctctccctctcctccccctataacaaaaaaacctaaccttcctcttaaccattccatgaaatgatcatgttgtccatttataaaaatagtatcaagcatggtgtctgacaaacagtaggcattctggcatccaatgtaagcatactatcagaatcctgcagcagaggagaggctgggagaatacacaagccagacaagccagggctcacatttcccccagatctactttgcccattcctgctgttaaccctttggtgacattcacaaacctttgtatccttttacaaacaccagaactgtttaactgtttctccctgtgtcagtttgctcatcacccacccaaaaaaacatgtcattctccagtaccttcatggatgcagggaggggaaccaacacagaaagacagggcagcgttacggtgtacccagaacctagtcctgtatgacaacaaagaacaccatccgtatccctagcccaaaggaattttcagcttaggtaaaaagacaaaggtacttgcaactattgaagagccattaagaacatgtattggttaagaggaaggtttttattgtagacgatcaagagaaagagagagaagaggagaggagaactgggagtccttagcactgaagaaccattcatgcatccttccttaattcaacagtttctggatacggaaagaaaatagatgttccagaggaacttcatctactttggttattgtctttcagcattctcatacaagaagccaacctgagcggcacagcccccctggaagccacaagcaatgcccaagaagaagaggaaggtgacctctgatgaagtcaggaagaacctgatggacatgttcagggacaggcaggccttctctgaacacacctggaagatgctcctgtctgtgtgcagatcctgggctgcctggtgcaagctgaacaacaggaaatggttccctgctgaacctgaggatgtgagggactacctcctgtacctgcaagccagaggcctggctgtgaagaccatccaacagcacctgggccagctcaacatgctgcacaggagatctggcctgcctcgcccttctgactccaatgctgtgtccctggtgatgaggagaatcagaaaggagaatgtggatgctggggagagagccaagcaggccctggcctttgaacgcactgactttgaccaagtcagatccctgatggagaactctgacagatgccaggacatcaggaacctggccttcctgggcattgcctacaacaccctgctgcgcattgccgaaattgccagaatcagagtgaaggacatctcccgcaccgatggtgggagaatgctgatccacattggcaggaccaagaccctggtgtccacagctggtgtggagaaggccctgtccctgggggttaccaagctggtggagagatggatctctgtgtctggtgtggctgatgaccccaacaactacctgttctgccgggtcagaaagaatggtgtggctgccccttctgccacctcccaactgtccacccgggccctggaagggatctttgaggccacccaccgcctgatctatggtgccaaggatgactctgggcagagatacctggcctggtctggacactctgccagagtgggtgctgccagggacatggcgagggctggtgtgtccatccctgaaatcatgcaggctggtggctggaccaatgtgaacattgtgatgaactacatcagaaacctggactctgagactggggccatggtgaggctgctcgaggatggggacggaagcggagctactaacttcagcctgctgaagcaggctggagacgtggaggagaaccctggacctatgagctttccatgtaaatttgtagccagcttccttctgattttcaatgtttcttccaaaggtgcagtctccaaagagattacgaatgccttggaaacctggggtgccttgggtcaggacatcaacttggacattcctagttttcaaatgagtgatgatattgacgatataaaatgggaaaaaacttcagacaagaaaaagattgcacaattcagaaaagagaaagagactttcaaggaaaaagatacatataagctatttaaaaatggaactctgaaaattaagcatctgaagaccgatgatcaggatatctacaaggtatcaatatatgatacaaaaggaaaaaatgtgttggaaaaaatatttgatttgaagattcaagagagggtctcaaaaccaaaaatctcctggacttgtatcaacacaaccctgacctgtgaggtaatgaatggaactgaccccgaattaaacctgtatcaagatgggaaacatctaaaactttctcagagggtcatcacacacaagtggaccaccagcctgagtgcaaaattcaagtgcacagcagggaacaaagtcagcaaggaatccagtgtcgagcctgtcagctgtccagagaaaggtctggacatctatctcatcattggcatatgtggaggaggcagcctcttgatggtctttgtggcactgctcgttttctatatcaccaaaaggaaaaaacagaggggaagcggagagggcagaggaagtcttctaacatgcggtgacgtggaggagaatcccggccctatgaggctctacttgttcacgctcttggtaactgtcttttcaggtaggtctgatggtcccaactctccagctcaaactgttgctcctagactccttgtttctaggatccaacttcatggagacacttacatcagagttacccccaacaaaatctcttacaagatgtatccctacaagacacagtcacacaggggcaaagctgaaaagacatgtaaccactagtaatcagagacggaaatgaaaattcctaattttaagaccaggagtctggtaaagggtcctctctaaagatttaaaacacacacacacacacacacacacacacacacaaaacaaacaaacaaacaaccttgacctcaaaccaaatgtctcttctgaattgtgtcatttgggggaaagtaactaaattaactatttttcctggccttagtgttccattgtaagggaggaagtcatctacatagggaaattataaagcaaatgcaaaatagtctacaaaagtcgtgctaagctaccaccagtttgtcaccaatcagtgacaagtgacaataatccttttttgtctttaaaaagattattgtttgtgagttactattgtggaatttgagaccacaagaaaagaccacacactcaattctgattataattagctacatttatttatttatttatttatttatttatttattttctagcagggcaaccatctctaagccaaatcagaaatgtgccacaccaccagggatgggggaaaggtttttaaaggcaaacaccacgatcactccacttgtgtgaaatgt

SEQ ID NO: 158 - DNA, 4210 bp, synthetic construct
  source 1..4210: mol_type = other DNA
tgttgttgtttgagacaaagtctctccttgtagccctcttctgcctttgcctcaaggtgttcaaacagtccctgcttctcttcctgaattggtaactgagcctcaaggcaaactcagcatgggcttctttgtgattgcatttcctgtggaaggtggagtgaagccttgctcagttgatttgagttctagtataatagtcctagcagattccagtaaccaaggccagcacttagtgggctgtcagaggatttgaccactcacctctagataagttctatcctcctttcactcctcctgaccactttgtgccctactcctggccagtttctataaaaccctgggagacgggaagggtctggaccaccttcaaactcatgctcagtgacagagctattttggctgggactgtgagccaggactccaggatccctgttcccagccgcactgcccaacaactacacagcctcccttccgcagaagagccagacgctgtgacgccggctccctgcagcctgtgctgcagccgctgtccaccggaggggggcgaatccacgtcaacctgttgtttgcccagctcctattgatcaagtcagagctacaaggaaatgcggcacacacacgcgcttggaaagtttagcttacaggaagttttgggagagcagcgccagtaactgggcggccgggacaacacaggcggtgaaggcgagggactgtgcagtagaaatccgccgactcaaccctttgggctttatttatttacttttggagcaacgcgatccctaggtcgctgagcccaaatgcccaagaagaagaggaaagtctccaacctgctgactgtgcaccaaaacctgcctgccctccctgtggatgccacctctgatgaagtcaggaagaacctgatggacatgttcagggacaggcaggccttctctgaacacacctggaagatgctcctgtctgtgtgcagatcctgggctgcctggtgcaagctgaacaacaggaaatggttccctgctgaacctgaggatgtgagggactacctcctgtacctgcaagccagaggcctggctgtgaagaccatccaacagcacctgggccagctcaacatgctgcacaggagatctggcctgcctcgcccttctgactccaatgctgtgtccctggtgatgaggagaatcagaaaggagaatgtggatgctggggagagagccaagcaggccctggcctttgaacgcactgactttgaccaagtcagatccctgatggagaactctgacagatgccaggacatcaggaacctggccttcctgggcattgcctacaacaccctgctgcgcattgccgaaattgccagaatcagagtgaaggacatctcccgcaccgatggtgggagaatgctgatccacattggcaggaccaagaccctggtgtccacagctggtgtggagaaggccctgtccctgggggttaccaagctggtggagagatggatctctgtgtctggtgtggctgatgaccccaacaactacctgttctgccgggtcagaaagaatggtgtggctgccccttctgccacctcccaactgtccacccgggccctggaagggatctttgaggccacccaccgcctgatctatggtgccaaggatgactctgggcagagatacctggcctggtctggccactctgccagagtgggtgctgccagggacatggccagggctggtgtgtccatccctgaaatcatgcaggctggtggctggaccaatgtgaacattgtgatgaactacatcagaaacctggactctgagactggggccatggtgaggctgctcgaggatggggacggaagcggagccacgaacttctctctgttaaagcaagcaggagacgtggaagaaaaccccggtcctatggtgagcaagggcgaggaggtcatcaaagagttcatgcgcttcaaggtgcgcatggagggctccatgaacggccacgagttcgagatcgagggcgagggcgagggccgcccctacgagggcacccagaccgccaagctgaaggtgaccaagggcggccccctgcccttcgcctgggacatcctgtccccccagttcatgtacggctccaaggcgtacgtgaagcaccccgccgacatccccgattacaagaagctgtccttccccgagggcttcaagtgggagcgcgtgatgaacttcgaggacggcggtctggtgaccgtgacccaggactcctccctgcaggacggcacgctgatctacaaggtgaagatgcgcggcaccaacttcccccccgacggccccgtaatgcagaagaagaccatgggctgggaggcctccaccgagcgcctgtacccccgcgacggcgtgctgaagggcgagatccaccaggccctgaagctgaaggacggcggccactacctggtggagttcaagaccatctacatggccaagaagcccgtgcaactgcccggctactactacgtggacaccaagctggacatcacctcccacaacgaggactacaccatcgtggaacagtacgagcgctccgagggccgccaccacctgttcctggggcatggcaccggcagcaccggcagcggcagctccggcaccgcctcctccgaggacaacaacatggccgtcatcaaagagttcatgcgcttcaaggtgcgcatggagggctccatgaacggccacgagttcgagatcgagggcgagggcgagggccgcccctacgagggcacccagaccgccaagctgaaggtgaccaagggcggccccctgcccttcgcctgggacatcctgtccccccagttcatgtacggctccaaggcgtacgtgaagcaccccgccgacatccccgattacaagaagctgtccttccccgagggcttcaagtgggagcgcgtgatgaacttcgaggacggcggtctggtgaccgtgacccaggactcctccctgcaggacggcacgctgatctacaaggtgaagatgcgcggcaccaacttcccccccgacggccccgtaatgcagaagaagaccatgggctgggaggcctccaccgagcgcctgtacccccgcgacggcgtgctgaagggcgagatccaccaggccctgaagctgaaggacggcggccactacctggtggagttcaagaccatctacatggccaagaagcccgtgcaactgcccggctactactacgtggacaccaagctggacatcacctcccacaacgaggactacaccatcgtggaacagtacgagcgctccgagggccgccaccacctgttcctgtacggcatggacgagctgtacaagggaagcggagccacgaacttctctctgttaaagcaagcaggagacgtggaagaaaaccccggtcctatgcaacggctcgttttagtctccattctcctgtgcgcgaactttagctgctatccggacacttttgcgactccgcagagagcatccatcaaagctttgcgcaatgccaacctcaggagagatggtaagcgattcatttgatttgtgttcagcattgaaaaggtcacatttgctattgtcaaggttctttgggtcattcaccagaccccacctcctccgattttgaatttttcaaatgaactcagaaggcattctctggaaaggattctcctgcctgctcctcacccttccccaccccccccaccccccgctaaaattgcccctcattctataactactagagagtgttttgaagtgtcctggaggccactgggggaagtgctggagtacactggggggtggggtcaagtggctttctccctgcaacttagaatcatatcagtaggtgtgtgtcctggagtagttgacaccaggatgtgggtgtctccttccaggctttgaaagctgcaggctgtgctcatcttggcattgtggtgggcggtggagtccaatggcctttactggataatgtaattcttatttatttttttattttagttaggggagtagggatgacacgtttcaacactgtggttatttttgcagcagactggccatgtataaatcatttgttttcaaaagaagtcagtgttgtcctttatgtccctcaagtgactttcccttggagttcaacaagggtcaggaactaagtgtgtgggaggcagagttcctggaatgttcttgtagcacaaggtacctggctt

SEQ ID NO: 159 - DNA, 3371 bp, synthetic construct
  source 1..3371: mol_type = other DNA
ccagggtgtatcagaggcagggtcagaaagtcatctcaaaatcatgttgcaatccccctggggctgtgtgtctcttaccagcccctgttcccacccactactgaccagtatctgggactgtttagatgacatctcccactgcttaggaagagagatgagctcaggcaggctgggggccccccggaacaccatcccatccccaccaggtttgtagaggaaggccaggaggtccacgtgctgagtgacctgagttcttagaactccacagagtctgagctgtgggcatctacctgtgctggctgaccccacgggccacagtagcctcttagccttgccctgcagcacactgggcattaaccgaagggaaaacggtagcatctaaatgcttccctcttccaagattctgacccagagcaaaaatggaagcagacagcagtggtaggccatgccccaccaaggctatggaaatgtttatgtccttgtcacctgtctgctcagacaactatctcaagagcctaagcgttctctgcttccatgcagggagaagatggcttaccagtccaaggctgctggaacaagtccggaagcggagccacgaacttctctctgttaaagcaagcaggagacgtggaagaaaaccccggtcctgctggagacatgagagctgccaacctttggccaagcccgctcatgatcaaacgctctaagaagaacagcctggccttgtccctgacggccgaccagatggtcagtgccttgttggatgctgagccccccatactctattccgagtatgatcctaccagacccttcagtgaagcttcgatgatgggcttactgaccaacctggcagacagggagctggttcacatgatcaactgggcgaagagggtgccaggctttgtggatttgaccctccatgatcaggtccaccttctagaatgtgcctggctagagatcctgatgattggtctcgtctggcgctccatggagcacccagtgaagctactgtttgctcctaacttgctcttggacaggaaccagggaaaatgtgtagagggcatggtggagatcttcgacatgctgctggctacatcatctcggttccgcatgatgaatctgcagggagaggagtttgtgtgcctcaaatctattattttgcttaattctggagtgtacacatttctgtccagcaccctgaagtctctggaagagaaggaccatatccaccgagtcctggacaagatcacagacactttgatccacctgatggccaaggcaggcctgaccctgcagcagcagcaccagcggctggcccagctcctcctcatcctctcccacatcaggcacatgagtaacaaaggcatggagcatctgtacagcatgaagtgcaagaacgtggtgcccctctatgacctgctgctggaggcggcggacgcccaccgcctacatgcgcccactagccgtggaggggcatccgtggaggagacggaccaaagccacttggccactgcgggctctacttcatcgcattccttgcaaaagtattacatcacgggggaggcagagggtttccctgccacaatgtccaatttactgaccgtacaccaaaatttgcctgcattaccggtcgatgcaacgagtgatgaggttcgcaagaacctgatggacatgttcagggatcgccaggcgttttctgagcatacctggaaaatgcttctgtccgtttgccggtcgtgggcggcatggtgcaagttgaataaccggaaatggtttcccgcagaacctgaagatgttcgcgattatcttctatatcttcaggcgcgcggtctggcagtaaaaactatccagcaacatttgggccagctaaacatgcttcatcgtcggtccgggctgccacgaccaagtgacagcaatgctgtttcactggttatgcggcggatccgaaaagaaaacgttgatgccggtgaacgtgcaaaacaggctctagcgttcgaacgcactgatttcgaccaggttcgttcactcatggaaaatagcgatcgctgccaggatatacgtaatctggcatttctggggattgcttataacaccctgttacgtatagccgaaattgccaggatcagggttaaagatatctcacgtactgacggtgggagaatgttaatccatattggcagaacgaaaacgctggttagcaccgcaggtgtagagaaggcacttagcctgggggtaactaaactggtcgagcgatggatttccgtctctggtgtagctgatgatccgaataactacctgttttgccgggtcagaaaaaatggtgttgccgcgccatctgccaccagccagctatcaactcgcgccctggaagggatttttgaagcaactcatcgattgatttacggcgctaaggatgactctggtcagagatacctggcctggtctggacacagtgcccgtgtcggagccgcgcgagatatggcccgcgctggagtttcaataccggagatcatgcaagctggtggctggaccaatgtaaatattgtcatgaactatatccgtaacctggatagtgaaacaggggcaatggtgcgcctgctggaagatggcgatgggaacaaggtaagattcccagaaggccatgcagctctgcgtcaaaggtgctgctctttctcaacagtgccataaagttggcagtttcccacctgcttttctgcagatgagacaggaagatgtgagtgggtcaagaaagttgctacctcaccagcggttagctgatgggcggagcgggggcaggggcagggcattaaacatctcactgcacatacctgcagaacacttagagacattttaaggaactaggtatatagatcagttaataagagtgcttagcatgcacaaagccctgggtctgattcgcagcgctgcgtaaatcctgcatggtgctacgtgtacgtaatctcagcatccactcacctaggagacggaggtgtcccgagcaccaagatatcagcagatttaaaatgcccttgtcatttgccatcattaaagcagtcagtttaatactatagggccatccctctcagccgcagctcccaagtcacaggactccccagcctaagggcagaagccttccttagtcctcggcaggatccacaaccagatggtgggcagccgcgcatgcgtgccgtctccctgcacctcccctccccctcagcatcttctcagtcccccaccaccacccaccaaagttatcagtatgtcctcattgtagggtttaagaccctgcactcacaagactttgtacttagccagtccagccctatgccactaactctgaattgcagagatggctcagcaccccgtgcccc

SEQ ID NO: 160 - DNA, 4003 bp, synthetic construct
  source 1..4003: mol_type = other DNA
tctttcttttcctaccttcccctgccctctttccttctctccctccctccttccatccttctctccttctttctttctttctttctttctctctctctctttctttctttctttctttctttctttctttctttctttctttctttctttctttctttctttctttttggccttttttgagacatggtcttactctgttatccaggttagcctgaatgaagttcatggcaatcctctggccttacctcccacgtgctgggattagaggcacaagacatcatgttcatcaatctacctcaaagaccttggccacataactgacatgtgttgtccatatgtggctctatgaccatgtgttcacagctgaacatctggcagtagggtttaaatgccccagctctgatgtcccatcctctggaaggacctgagcttcattctagctctgcttatgacaactggttacatcccacctttggtacatcttacaggagatgttctctgccaagtgccagcagccgtaggcacttgtgaatggttactgcccatgttgggattgttgcttcagctcccatgcacctctgagaggaagggcagtcctgcttgggagcccagtagataatgattatacctcttcccaggtgctccccccagtcccaagccctcattaccctacatgcatattcatgagggatggcctccttcactactctgtaaatgggtcaaaagcaggaagtagaggccagtgcagagatctgaggcccaggggacagagcctcaaagcaggagcacactgagtcctcatgcccaagaagaagaggaaagtcacctctgatgaagtcaggaagaacctgatggacatgttcagggacaggcaggccttctctgaacacacctggaagatgctcctgtctgtgtgcagatcctgggctgcctggtgcaagctgaacaacaggaaatggttccctgctgaacctgaggatgtgagggactacctcctgtacctgcaagccagaggcctggctgtgaagaccatccaacagcacctgggccagctcaacatgctgcacaggagatctggcctgcctcgcccttctgactccaatgctgtgtccctggtgatgaggagaatcagaaaggagaatgtggatgctggggagagagccaagcaggccctggcctttgaacgcactgactttgaccaagtcagatccctgatggagaactctgacagatgccaggacatcaggaacctggccttcctgggcattgcctacaacaccctgctgcgcattgccgaaattgccagaatcagagtgaaggacatctcccgcaccgatggtgggagaatgctgatccacattggcaggaccaagaccctggtgtccacagctggtgtggagaaggccctgtccctgggggttaccaagctggtggagagatggatctctgtgtctggtgtggctgatgaccccaacaactacctgttctgccgggtcagaaagaatggtgtggctgccccttctgccacctcccaactgtccacccgggccctggaagggatctttgaggccacccaccgcctgatctatggtgccaaggatgactctgggcagagatacctggcctggtctggccactctgccagagtgggtgctgccagggacatggccagggctggtgtgtccatccctgaaatcatgcaggctggtggctggaccaatgtgaacattgtgatgaactacatcagaaacctggactctgagactggggccatggtgaggctgctcgaggatggggacgggtccggagccacgaacttctctctgttaaagcaagcaggagacgtggaagaaaaccccggtcctatgaaccggggagtcccttttaggcacttgcttctggtgctgcaactggcgctcctcccagcagccactcagggaaagaaagtggtgctgggcaaaaaaggggatacagtggaactgacctgtacagcttcccagaagaagagcatacaattccactggaaaaactccaaccagataaagattctgggaaatcagggctccttcttaactaaaggtccatccaagctgaatgatcgcgctgactcaagaagaagcctttgggaccaaggaaactttcccctgatcatcaagaatcttaagatagaagactcagatacttacatctgtgaagtggaggaccagaaggaggaggtgcaattgctagtgttcggattgactgccaactctgacacccacctgcttcaggggcagagcctgaccctgaccttggagagcccccctggtagtagcccctcagtgcaatgtaggagtccaaggggtaaaaacatacagggggggaagaccctctccgtgtctcagctggagctccaggatagtggcacctggacatgcactgtcttgcagaaccagaagaaggtggagttcaaaatagacatcgtggtgctagctttccagaaggcctccagcatagtctataagaaagagggggaacaggtggagttctccttcccactcgcctttacagttgaaaagctgacgggcagtggcgagctgtggtggcaggcggagagggcttcctcctccaagtcttggatcacctttgacctgaagaacaaggaagtgtctgtaaaacgggttacccaggaccctaagctccagatgggcaagaagctcccgctccacctcaccctgccccaggccttgcctcagtatgctggctctggaaacctcaccctggcccttgaagcgaaaacaggaaagttgcatcaggaagtgaacctggtggtgatgagagccactcagctccagaaaaatttgacctgtgaggtgtggggacccacctcccctaagctgatgctgagtttgaaactggagaacaaggaggcaaaggtctcgaagcgggagaaggcggtgtgggtgctgaaccctgaggcggggatgtggcagtgtctgctgagtgactcgggacaggtcctgctggaatccaacatcaaggttctgcccacatggtccaccccggtgcagccaatggccctgattgtgctggggggcgtcgccggcctcctgcttttcattgggctaggcatcttcttctgtgtcaggtgccggcaccgagggtccggagagggcaggggaagtcttctaacatgcggggacgtggaggaaaatcccggccccatggacgggaggatggtgagaggattgggcatcagtgaactgtggggggcttgggggaactgaggacctggggaggatttagttcctgtgtttcatatttgaaaagtaaagtccaggaatagtagatcagagaaccctggggcaaagggtatagggaagccagggcttgcttcctacggggactagggagttgagcatggaccacacagggggatggactaaatgaccttggcaaatttttctccagtggatctggtttctgtgccattaagtggaagagctgaatccagcatcctagcactcccatgaggactgaagaggctgggtgacttgtcatggtcacacagctgctaactgtgatcttgtctttggaggtgtgagagacagagttattccagactcacaccggaggtttaagactgaggggaaggctgatgggctgaggctgctaagcaaccaagcttttcaacacccctgtggggttttgtttttgttgtttgtttgtttggttatttatttatttattatttatttttgaggcaaggtttctctgtgtagtcttggttatcttggaactcattcaagtgtgcaccactacctcctggcttgatccgcttcctaatatcctgtctttcatggctcctgagataaccagagcaaaatgtttgttcccattttacagatgagaagtgtgaggctgaaggaggaggaggtacccggacaggactacacagtgagtagtctgcacagggctggtccttccctacagggtgatgcagggtgattccaaagcctagctg

SEQ ID NO: 161 - DNA, 1951 bp, synthetic construct
  source 1..1951: mol_type = other DNA
ggttcctgcggcctctagactgtatgaatgtggagagaagcatggttcatctatggagatcagagagtagccagcagaggctctctccttccaccacgtgggcactctgcccactgcagctctggcacccagagcagaagaagaagccattagcatgggtagggaagagagtgagcaggctctgcagggctctaggcaggaagcagtgtgtcagaaagtgcagcctgtgcacttacctgtgccacctgccctctgtaactgaaggttctaggtgctggcagtggttgtcataaatcattgtgatttatgcgatcagaggaaggccgctcggtcacattcagcttttattcctttgatggttttactccacggtagtgggatagtgtcaggagacatgcattcttcatggacctctgggctactgaaggctagtgcagaagcaagccatcgctgtgaaagaatagagataggcatctccaccagggttgtttggtttttccttttttaagaagaatactaagattaggataatggcttcaatatgatgtggtctaaattagtagcaaagcttgaaatctggcctgctataacttcgtatagtacacattatacgaagttataccaaggcctttctttgttctgaggcacagggctatagggctggcagtgaacgaactcatagacagctcccatgggtcatggctggggccctgggcatacccgggcagtacacaggtcctgtggcttggtggacaggttctgtggcatttcacgacaacgtgtggacaggttgagaatggctgtggctgccatgtgtgcggcctccatgtcatgtgtgtagtcaaagctgctcttgctacacgttgagctagcgctgctgccaccaccacagctgaggttgctgctgctgctaggtgcatagctgctggtggtgctgctgctggggctggcattcttgcagtaccgcttggctgcagagacagaggacagtgtggttaggccctgcacccaggatgcaggatacacaattggtcctgaccacctatctttatacacaaagaaattagggttattcatgaagagcccagattctgtccccttccacactgtgcatgcttgaaggaacagataattaggatgaccttgggagaggatcacccttgttttataacttcgtataatgtatgctatacgaagttatttgacagagttctgtcacagcagcactgaaaaatatatgaaagtgcagcttgtcctgtgtgcccgttaccttcccaaccagagggacaggtggctagacaataacttcgtataatgtgtactatacgaagttattcagaggccacagggtcattcaggttagaggtcactctcctgagaaaatcaaggtttattttgacattgcttgttcactgccatctaaatgccttcgcccctctgccagcaaagctgactgatgaccttggcctattaaaaggcatgcgcgtgagtgtgtgtgtgtgtgtgtgtgtgtgtgtgtgtgtgtgtgtgtgtgtgtgtgtgtgtgtttgtggggtctttttgttttttacctatttgacacagtagcagatatggagatatccaggtcagctcagtccagaatctccaaaatagggccttgggaaactatactgcataccaacagttctaaaatggaaatctggccccggattccatctcagaaggaaaattctcgtaccttctccatcccttcttcaacattcaagtccttttcttttcccccattctgaaattattatcatcaacagaatgccaggaagatagttaagctgctgtatgatggaaggatagaggtggacagtggatggatgggggaaggaccaatgagtacattgctgaagtggtgatggacgagggaaattgggtgggtggatagatggatggctaatagatggatgggcaggaaccc

SEQ ID NO: 162 - DNA, 4241 bp, synthetic construct
  source 1..4241: mol_type = other DNA
aagagggaaacaattcccctactagacaccacaaacaagcaaataaaaaggcccgtgtcaggaacaggttacctcttttagagatgttgggttcccctctagaagttgatggtaaggccctgttgttgaagccaccacatacctgggtcatagaacatgggaaaatcgttgtgatttttttttctttctcgtggtttaacagtatctcaaagagagtaaaaaaataacactgtgaaaatagcttatctttgtgagctgattgtctttaagagggaggaactaagttcaaaagaagactgtaaaagaacgggagagttgatctggcccacaactgcccctggctcgggagttgcttgtcttctcgtgggccccgtgcatgtgggccccatgcagcttggggtccgcacatggtccggtgaacccacaaaagagcagaatcgggctggcctgtggcaggacgactgggcccttcccgctttcttcactctgcctcctggtttggtaatagcaaaagcccacgtttcacccttaaatcgttccagaaaagcaagagttgccaaagaccactgtgtcgggtttgctcaagccacagcactgggcatcactacctgcagccctcctctctctctctctctctctctcttcctccctcaggcatcgatttcaacatttctggttgtactgctgcaggcccgtcagaggagagcagatcaggacctgtggagccagtcacaggagagcacggcaggacctgtggagcgggtactcacagagctgatatccccagagccttcatcatggtgcccaagaagaagaggaaagtctccaacctgctgactgtgcaccaaaacctgcctgccctccctgtggatgccacctctgatgaagtcaggaagaacctgatggacatgttcagggacaggcaggccttctctgaacacacctggaagatgctcctgtctgtgtgcagatcctgggctgcctggtgcaagctgaacaacaggaaatggttccctgctgaacctgaggatgtgagggactacctcctgtacctgcaagccagaggcctggctgtgaagaccatccaacagcacctgggccagctcaacatgctgcacaggagatctggcctgcctcgcccttctgactccaatgctgtgtccctggtgatgaggagaatcagaaaggagaatgtggatgctggggagagagccaagcaggccctggcctttgaacgcactgactttgaccaagtcagatccctgatggagaactctgacagatgccaggacatcaggaacctggccttcctgggcattgcctacaacaccctgctgcgcattgccgaaattgccagaatcagagtgaaggacatctcccgcaccgatggtgggagaatgctgatccacattggcaggaccaagaccctggtgtccacagctggtgtggagaaggccctgtccctgggggttaccaagctggtggagagatggatctctgtgtctggtgtggctgatgaccccaacaactacctgttctgccgggtcagaaagaatggtgtggctgccccttctgccacctcccaactgtccacccgggccctggaagggatctttgaggccacccaccgcctgatctatggtgccaaggatgactctgggcagagatacctggcctggtctggccactctgccagagtgggtgctgccagggacatggccagggctggtgtgtccatccctgaaatcatgcaggctggtggctggaccaatgtgaacattgtgatgaactacatcagaaacctggactctgagactggggccatggtgaggctgctcgaggatggggactgacggccaattctgcagtcgacggtaccgcgggcccgggatccgcccctctccctcccccccccctaacgttactggccgaagccgcttggaataaggccggtgtgcgtttgtctatatgttattttccaccatattgccgtcttttggcaatgtgagggcccggaaacctggccctgtcttcttgacgagcattcctaggggtctttcccctctcgccaaaggaatgcaaggtctgttgaatgtcgtgaaggaagcagttcctctggaagcttcttgaagacaaacaacgtctgtagcgaccctttgcaggcagcggaaccccccacctggcgacaggtgcctctgcggccaaaagccacgtgtataagatacacctgcaaaggcggcacaaccccagtgccacgttgtgagttggatagttgtggaaagagtcaaatggctctcctcaagcgtattcaacaaggggctgaaggatgcccagaaggtaccccattgtatgggatctgatctggggcctcggtacacatgctttacatgtgtttagtcgaggttaaaaaaacgtctaggccccccgaaccacggggacgtggttttcctttgaaaaacacgatgataatatggccacaaccatggtgagcaagggcgaggagctgttcaccggggtggtgcccatcctggtcgagctggacggcgacgtaaacggccacaagttcagcgtgtccggcgagggcgagggcgatgccacctacggcaagctgaccctgaagttcatctgcaccaccggcaagctgcccgtgccctggcccaccctcgtgaccaccctgacctacggcgtgcagtgcttcagccgctaccccgaccacatgaagcagcacgacttcttcaagtccgccatgcccgaaggctacgtccaggagcgcaccatcttcttcaaggacgacggcaactacaagacccgcgccgaggtgaagttcgagggcgacaccctggtgaaccgcatcgagctgaagggcatcgacttcaaggaggacggcaacatcctggggcacaagctggagtacaactacaacagccacaacgtctatatcatggccgacaagcagaagaacggcatcaaggtgaacttcaagatccgccacaacatcgaggacggcagcgtgcagctcgccgaccactaccagcagaacacccccatcggcgacggccccgtgctgctgcccgacaaccactacctgagcacccagtccgccctgagcaaagaccccaacgagaagcgcgatcacatggtcctgctggagttcgtgaccgccgccgggatcactctcggcatggacgagctgtacaagtaaagcggccgcgactctagatcataatcagccataccacatttgtagaggttttacttgctttacctcccacacctccccctgaacctgaaacataaaatgaatgcaattgttgttgttaacttgtttattgcagcttataatggttacaaataaagcaatagcatcacaaatttcacaaataaagcatttttttcactgcattgtagttgtggtttgtccaaactcatcaatgtatcttagtgcagtccctggcctgggcaggtgcgtaggcttggacagggagagtgggctgggcctcaggagccattggtgcacgagcctgtggttccctcctgctatgcaaggaagcaaaggtgctccggagatctttgcttcaccccacctggccctgactcctggcttggctgttttcagctcaagggctgaaactataggccctgttctgaaaaatacagtcagtgagcctcttcactgggaggttttttgttgttcatttgtctgtttccctcctgagtatttagttcaagaaccaccagacaagggtcaccttccctaactttatatagcttgtcctccaggaaggcagcctgggggcaaagaactctagatggtcttacaaaaatactattttctatatctatattatatatacatatatttatcatttacttgattatgtatgtgtgtgcctgggtgagtttaagcataccacgtgcatcccggtgcccacagtggccagaagaggacatcagatccctttgaatggagttataggtgtttggaagctacctgatgtgggtgctggggtcgaacccaggtcctctgcagtaagtgctcttaaccaccaagccatctcccaacctgtccttgaaaacttaatgcagatttattattattattattattattattattattattattattattataaagaaaaaccgagctggagagatggctcagaggttaagagcacttactcttcttccagaggttctgagttcaagtcccagcaaccacatggtggctcacaactatc

SEQ ID NO: 163 - DNA, 1994 bp, synthetic construct
  source 1..1994: mol_type = other DNA
tgagctgatgatggctttgttgcaaactgttgcacctgctggttacttccagcgatacattaatgctcatctggctctgcaaatcttaccgtttgcttaggccaaatggcgcatcaatgactatcgctctttacaaaactcttgaatcagtgttatgtaatgaataacataaaataacattgataatgttatttatgttattttccacgtgaagaaccccagtaaatcttgcagtattgaaactcagtgagcaaggcgtcttagacaagctgaaaaacaaatggtggtacgataaaggtgaatgtggagccaaggactcgggaagtaaggtcagttgctgcaggttttatgtgaaaaacaaaaatcaaacacaaacagcaaaatcaaaccacaagtgtgttagtgggaatgacccatcttaagtaaaaatgtaaatgcaagtaagcatgagatgcatagtttggtaagatgttttggtaatgcctgcagagttactgatttgttttctttatttcattttaagtacagcatatgcatttaatatattgatttcagtctgtgttcatgtgttacttgtacatcctagtgcatgaaacagtgataacttcgtataggatactttatacgaagttattgcgattcggataacttcgtatagcatacattatacgaagttatacatggtggaacagatttggcgggaatctgtccacattcaccccagagactgtgccattaaagaggagaatagacaggtgaactgcaggttagtcactggtcaggaacatgaagagcatcaacaatacatacaggatgatccactggccatcttcctcagttaaaagagcttaaggacgcgacaagaaagctaaacgtgcacttagaagtttgtattagagcctcgttcctaccccctaaattttaacactctcgatgccctcaacgttgtaaccttccttataagttgcaaaattctgggaattctgcgaggaagatgggttaatattctgtgcattctttgccaccttcattcgtttcgcctcggcccttgacttgtaacagaactcaatcaaagccaccagcattgccaaaccaaggcccccgacaaggatgtagaatactccagcaacgttgctcagactgagggcactggtcttttcctaaaggatgcatataagaagaggttattaggaggacaaactggcgaatggaagagcagataatgtcacatagcattatacacgagcagcctattcacacgagatggactcaaatcatagaaacaatgaccttccccatgttcttaaagggctatgacaaggccatatggaaattagctgaagaaatttggtggactcaaataacttcgtataaagtatcctatacgaagttattgatggcctaatgacaatcttaatagagcatctaagagtgttgatggggagggggtgttttcttgtctgtttcaatggcttagtttcagtatatataattactgattgcctagactacctgtgtgcatctcgtgtgctctgtttgtaccaagagataaagctttggtgacagaggaaggtagtggaagggagtactggtgatgaattgcagagtctaagagcccacaaacagtggattgcaattcttaactatcctcacacctgatttggatgaaaatgggtggacacctgcgctagccagtaaactgctggaaaactgacactctgtcttaggaatcttagcacctcaaaggcttgcaatattggtcagatcttcattgatggcactcctaagcccatgctatgaccaacaaccaaaccaagttaattatagaaaggagaaactccccatggtaactgaatatatttatatatcttagcaaataaatttgacacagcaactgacatagagagaaaggtttaagattttaatagttagaagtatagaccccgcagagagttaatttgagtccaccaaatttcttcagctaatttccatat

SEQ ID NO: 164 - DNA, 2571 bp, synthetic construct
  source 1..2571: mol_type = other DNA
tctagagggatatcccaatcccagctagtcccaccattaaggtcaagatgtgaggcgttcagtactgtgcccaatggtgccgagggggaaccatcactggtgagcaaagccatgctatacacacatgtggtggtgaactaaccaagcacgagagcacaggaagggaggaacagggtgtgaggctagagggcaggaggcagtgcagggaagggacagcatccaggaagagactggctgtcctagagcagggtggaacccagagcttcagccctgtctcccaggaagagctgatggctgtgggggagtccatagacatggctgagaagcacatgggtagggggcagcttggaagcaacaccccaaaatcactcaccccaaggactatttttctttttcttttttttttttgcggggaggtggtcaagggttcaagacagggtttctctgtgtagtcctggctgtcctggaactcactctgtagaccaggctggcctcgaactcagaaatccgcctgcctctgcctcccaagtgctgggattaaaggcgtgcaccaccactgctcggctgaacttctttatttttgcagcaccaggaaccatggtgcccaagaagaagaggaaagtctccaacctgctgactgtgcaccaaaacctgcctgccctccctgtggatgccacctctgatgaagtcaggaagaacctgatggacatgttcagggacaggcaggccttctctgaacacacctggaagatgctcctgtctgtgtgcagatcctgggctgcctggtgcaagctgaacaacaggaaatggttccctgctgaacctgaggatgtgagggactacctcctgtacctgcaagccagaggcctggctgtgaagaccatccaacagcacctgggccagctcaacatgctgcacaggagatctggcctgcctcgcccttctgactccaatgctgtgtccctggtgatgaggagaatcagaaaggagaatgtggatgctggggagagagccaagcaggccctggcctttgaacgcactgactttgaccaagtcagatccctgatggagaactctgacagatgccaggacatcaggaacctggccttcctgggcattgcctacaacaccctgctgcgcattgccgaaattgccagaatcagagtgaaggacatctcccgcaccgatggtgggagaatgctgatccacattggcaggaccaagaccctggtgtccacagctggtgtggagaaggccctgtccctgggggttaccaagctggtggagagatggatctctgtgtctggtgtggctgatgaccccaacaactacctgttctgccgggtcagaaagaatggtgtggctgccccttctgccacctcccaactgtccacccgggccctggaagggatctttgaggccacccaccgcctgatctatggtgccaaggatgactctgggcagagatacctggcctggtctggccactctgccagagtgggtgctgccagggacatggccagggctggtgtgtccatccctgaaatcatgcaggctggtggctggaccaatgtgaacattgtgatgaactacatcagaaacctggactctgagactggggccatggtgaggctgctcgaggatggggactgatctagacccccaagggcgaattctgcagatatccatcacactggcggccgctcgagtctagagggcccgtttaaacccgctgatcagcctcgactgtgccttctagttgccagccatctgttgtttgcccctcccccgtgccttccttgaccctggaaggtgccactcccactgtcctttcctaataaaatgaggaaattgcatcgcattgtctgagtaggtgtcattctattctggggggtggggtggggcaggacagcaagggggaggattgggaagacaatagcaggcatgctggggatgcggtgggctctatggtcccaggctgccaaggcttcagccaccacagcggtgaacccagggcctgatggcaagggaaaaggggccccatccacagggccagcccctgcccctggccccactcctgtcccagcttctgtgcccaggcccgctgccaaagtaggggacctgcctcctgggagctacagggtaaggttgtgggagctgggctgtactgatcccattcctcctcaccctgctcctctttcctacccctcttccttccctccctcctcatcctctcccctttgctggttttctctccttcctatctttctaatctctgcctcccatctgatactttctactctccatcctccctgacctgctctccgtcctccctggcctgctctccatcctccctaacctgctctccatcctccctggcctgctctccatcctccctggcctgctctccatcctccctggcccaccctgtgtgtgggagcttagagggtagcaaagccaggaacctgagaggagtatgttgttggccatgaccactcatctcaggagagccaccaggccaccaggctgacctctgaccttcctggaagttctcccccaggctccagattg

SEQ ID NO: 165 - DNA, 2946 bp, synthetic construct
  source 1..2946: mol_type = other DNA
tctagagggatatcccaatcccagctagtcccaccattaaggtcaagatgtgaggcgttcagtactgtgcccaatggtgccgagggggaaccatcactggtgagcaaagccatgctatacacacatgtggtggtgaactaaccaagcacgagagcacaggaagggaggaacagggtgtgaggctagagggcaggaggcagtgcagggaagggacagcatccaggaagagactggctgtcctagagcagggtggaacccagagcttcagccctgtctcccaggaagagctgatggctgtgggggagtccatagacatggctgagaagcacatgggtagggggcagcttggaagcaacaccccaaaatcactcaccccaaggactatttttctttttcttttttttttttgcggggaggtggtcaagggttcaagacagggtttctctgtgtagtcctggctgtcctggaactcactctgtagaccaggctggcctcgaactcagaaatccgcctgcctctgcctcccaagtgctgggattaaaggcgtgcaccaccactgctcggctgaacttctttatttttgcagcaccaggaaccatggtgagcaagggcgaggacgtcatcaaagagttcatgcgcttcaaggtgcgcatggagggctccatgaacggccacgagttcgagatcgagggcgagggcgagggccgcccctacgagggcacccagaccgccaagctgaaggtgaccaagggcggccccctgcccttcgcctgggacatcctgtccccccagttcatgtacggctccaaggcgtacgtgaagcaccccgccgacatccccgattacaagaagctgtccttccccgagggcttcaagtgggagcgcgtgatgaacttcgaggacggcggtctggtgaccgtgacccaggactcctccctgcaggacggcacgctgatctacaaggtgaagatgcgcggcaccaacttcccccccgacggccccgtaatgcagaagaagaccatgggctgggaggcctccaccgagcgcctgtacccccgcgacggcgtgctgaagggcgagatccaccaggccctgaagctgaaggacggcggccactacctggtggagttcaagaccatctacatggccaagaagcccgtgcaactgcccggctactactacgtggacaccaagctggacatcacctcccacaacgaggactacaccatcgtggaacagtacgagcgctccgagggccgccaccacctgttcctggggcatggcaccggcagcaccggcagcggcagctccggcaccgcctcctccgaggacaacaacatggccgtcatcaaagagttcatgcgcttcaaggtgcgcatggagggctccatgaacggccacgagttcgagatcgagggcgagggcgagggccgcccctacgagggcacccagaccgccaagctgaaggtgaccaagggcggccccctgcccttcgcctgggacatcctgtccccccagttcatgtacggctccaaggcgtacgtgaagcaccccgccgacatccccgattacaagaagctgtccttccccgagggcttcaagtgggagcgcgtgatgaacttcgaggacggcggtctggtgaccgtgacccaggactcctccctgcaggacggcacgctgatctacaaggtgaagatgcgcggcaccaacttcccccccgacggccccgtaatgcagaagaagaccatgggctgggaggcctccaccgagcgcctgtacccccgcgacggcgtgctgaagggcgagatccaccaggccctgaagctgaaggacggcggccactacctggtggagttcaagaccatctacatggccaagaagcccgtgcaactgcccggctactactacgtggacaccaagctggacatcacctcccacaacgaggactacaccatcgtggaacagtacgagcgctccgagggccgccaccacctgttcctgtacggcatggacgagctgtacaagtaatctagacccccaagggcgaattctgcagatatccatcacactggcggccgctcgagtctagagggcccgtttaaacccgctgatcagcctcgactgtgccttctagttgccagccatctgttgtttgcccctcccccgtgccttccttgaccctggaaggtgccactcccactgtcctttcctaataaaatgaggaaattgcatcgcattgtctgagtaggtgtcattctattctggggggtggggtggggcaggacagcaagggggaggattgggaagacaatagcaggcatgctggggatgcggtgggctctatggtcccaggctgccaaggcttcagccaccacagcggtgaacccagggcctgatggcaagggaaaaggggccccatccacagggccagcccctgcccctggccccactcctgtcccagcttctgtgcccaggcccgctgccaaagtaggggacctgcctcctgggagctacagggtaaggttgtgggagctgggctgtactgatcccattcctcctcaccctgctcctctttcctacccctcttccttccctccctcctcatcctctcccctttgctggttttctctccttcctatctttctaatctctgcctcccatctgatactttctactctccatcctccctgacctgctctccgtcctccctggcctgctctccatcctccctaacctgctctccatcctccctggcctgctctccatcctccctggcctgctctccatcctccctggcccaccctgtgtgtgggagcttagagggtagcaaagccaggaacctgagaggagtatgttgttggccatgaccactcatctcaggagagccaccaggccaccaggctgacctctgaccttcctggaagttctcccccaggctccagattg

SEQ ID NO: 166 - DNA, 1335 bp, synthetic construct
  source 1..1335: mol_type = other DNA
attcaaacaacaacagtaaaattcatcaaaggttatttgaggccatcaataattttaatagtataaagtttgaaaaccactgttctaaagagcagatgaggctctttaagtaagacacagaattgtagagagccagtacacacaacctgttactgatgttcctgtgcacgtggctgcagagtgtaaactacgtcactaaactgggtgtggacagcaagcagtgctgtgcagtatgattacattcatagttttttagctctaagagtggtcctgttctacagaaaagaaaagaacacttgttcattgacataccatagataacttcgtataggatactttatacgaagttattgcgattcggataacttcgtatagcatacattatacgaagttattctgtcctttccgtcagtggtaacgggtccacaggacctggcatagggcagaaattcttgctggataagcaaatgcatgagtggcacttggaaggccaggtttcctatgaaggaagcaactggttgaaagcgtctcaccaatatcatatactcctaccagctaacatggaggcagcggcttttgggagagccatactcctcatggattaggaggtaaggaaagcctgtgtttatggcagagaatacttacaggtgggggcttcttcctcatctcaaaagtccgagtggcaccaaaactgagggaagcaatgacggggcagctccccagggatggttcatcggcgctgtgccagtccacactgtccttctcatcccggtaaaaattacacagcaaggagttgaaggtgtggctggtgttctcttcaatgcggctcttcagagtccacagcacaggaagccactgacagcaagcacagggacaggcatacaagacacaatgggcagccattaaaaaaacaaaacaaacaaacaaaaaaaaccagaaagaaatatgaagtcagcgggtttctgagagggcaatgcaataaacagaaggcagaagagtagcttcgtcttctcccataacttcgtataaagtatcctatacgaagttataccaggagagccacaaacttgcttcggcctcccaagtgctaggatttctggcacacaccactaagtcaggctttgagttctatttttatgaagttagcctctaaatattaaatatttctcaagaaatcaattttgttgtttagaataaaatatgaacagaataggaggcacccagttgagagttcttttgttctttacttgagcctgggtgtgtggatccatgagctccggcagccccactgccccttttagggcagcactaatgttccagaaccaccgtgaacat

SEQ ID NO: 167 - DNA, 1393 bp, synthetic construct
  source 1..1393: mol_type = other DNA
caaacatgttagctgtgtgggctaaatatgacagtcccacctcactcatctctctcttttccacagctgtcgttacaaacagtgtctcttctggctacggaggaggcagcagcattggtgttggcagtggctttggcggtggccttggcagcggctttgctggtggccttggcccacgcttcaccaggggtggtgggggtcttggtttgggtagcgggctaagtgtggggggctctggcttcagtgcaggcagcagtcaaggaggcatgagcttcggcagtggtggtggcagcggctccagtgtcaaatttgtctccaccacctcctcctcccggcgcagcttcaagagcggaagcggagagggcagaggaagtcttctaacatgcggtgacgtggaggagaatcccggccctatgcccaagaagaagaggaaggtgtccaatttactgaccgtacaccaaaatttgcctgcattaccggtcgatgcaacgagtgatgaggttcgcaagaacctgatggacatgttcagggatcgccaggcgttttctgagcatacctggaaaatgcttctgtccgtttgccggtcgtgggcggcatggtgcaagttgaataaccggaaatggtttcccgcagaacctgaagatgttcgcgattatcttctatatcttcaggcgcgcggtctggcagtaaaaactatccagcaacatttgggccagctaaacatgcttcatcgtcggtccgggctgccacgaccaagtgacagcaatgctgtttcactggttatgcggcggatccgaaaagaaaacgttgatgccggtgaacgtgcaaaacaggctctagcgttcgaacgcactgatttcgaccaggttcgttcactcatggaaaatagcgatcgctgccaggatatacgtaatctggcatttctggggattgcttataacaccctgttacgtatagccgaaattgccaggatcagggttaaagatatctcacgtactgacggtgggagaatgttaatccatattggcagaacgaaaacgctgtaagaagagcctgctgcaagaccctggtcctcacgggcagccccgggcccacagagactgcttcttttaggcagtctcccaggccacgtttcctttttctggagagtagtctagaccatgcctgctgcagaaccacatgctttggttcccggaagggaacgaatcccaacctctggcctccccatggctcagttctacatttgtgttgcacgtcagcacctatacatgttctttggtgacccagaccccaaaatgttgcagaatgtaagccaccaaagcagaaccccatccctacccagatacccacctaaattctgtcctggttctgacttcctccagagtctgtccaa

SEQ ID NO: 168 - DNA, 3478 bp, synthetic construct
  source 1..3478: mol_type = other DNA
aacctcccacacctccccctgaacctgaaacataaaatgaatgcaattgttgttgttaacttgtttattgcagcttataatggttacaaataaagcaatagcatcacaaatttcacaaataaagcatttttttcactgcattctagttgtggtttgtccaaactcatcaatgtatcttatcatgtctggatctgcgactctagaggatcataatcagccataccacatttgtagaggttttacttgctttaaaaaacctcccacacctccccctgaacctgaaacataaaatgaatgcaattgttgttgttaacttgtttattgcagcttataatggttacaaataaagcaatagcatcacaaatttcacaaataaagcatttttttcactgcattctagttgtggtttgtccaaactcatcaatgtatcttatcatgtctggatctgcgactctagaggatcataatcagccataccacatttgtagaggttttacttgctttaaaaaacctcccacacctccccctgaacctgaaacataaaatgaatgcaattgttgttgttaacttgtttattgcagcttataatggttacaaataaagcaatagcatcacaaatttcacaaataaagcatttttttcactgcattctagttgtggtttgtccaaactcatcaatgtatcttatcatgtctggatccccatcaagctgatccggaacccttaatataacttcgtataatgtatgctatacgaagttattaggtccctcgacctgcagcccaagctagatcgaatttctagactcgagtggatccgccaccatggactacaaggacgacgatgacaaaccggtggaacggatgcgaatgcgcccgtggctggaggagcagataaattccaatacgataccagggctaaagtggctgaacaaggagaagaagattttccagatcccctggatgcatgcggctcggcacggatgggacgtggaaaaggatgctccgctcttcagaaactgggcgatccatacaggaaagcatcaaccaggaatagataaaccagatccaaaaacatggaaagcaaattttcgatgtgccatgaattccctgcccgacattgaggaagtgaaggacagaagcataaagaaaggaaacaacgccttcagagtctaccggatgctgcccttatccgaacgaccttccaagaaaggaaagaaaccaaagacagaaaaagaagagagagttaagcacatcaagcaagaaccagttgagtcatctttggggcttagtaatggagtaagtggcttttctcctgagtatgcggtcctgacttcagctataaaaaatgaagtggatagtacggtgaacatcatagttgtaggacagtcccatctggacagcaacattgaagatcaagagatcgtcactaacccgccagacatctgccaggttgtagaagtgaccactgagagtgatgaccagccagtcagcatgagtgagctctaccctctacagatttctcctgtgtcttcctacgcagaaagcgaaactaccgacagtgtggccagtgatgaagagaacgcagaggggagaccacactggaggaagaggagcatcgaaggcaagcagtacctcagcaacatggggacacggaacacctatctgctgcccagcatggcgacctttgtcacctccaacaagccagatctgcaggtcaccatcaaagaggagagctgtccgatgccttacaacagctcctggcccccatttacagaccttccccttcctgccccagtgacccccacgcccagcagcagtcggccagaccgggagacccgggccagtgtcatcaagaagacatctgatatcacccaggcccgtgtcaagagctgtaccggttcaggagccacgaacttctctctgttaaagcaagcaggagacgtggaagaaaaccccggtcctgtgagcaagggcgaggagctgttcaccggggtggtgcccatcctggtcgagctggacggcgacgtaaacggccacaagttcagcgtgtccggcgagggcgagggcgatgccacctacggcaagctgaccctgaagttcatctgcaccaccggcaagctgcccgtgccctggcccaccctcgtgaccaccctgacctacggcgtgcagtgcttcagccgctaccccgaccacatgaagcagcacgacttcttcaagtccgccatgcccgaaggctacgtccaggagcgcaccatcttcttcaaggacgacggcaactacaagacccgcgccgaggtgaagttcgagggcgacaccctggtgaaccgcatcgagctgaagggcatcgacttcaaggaggacggcaacatcctggggcacaagctggagtacaactacaacagccacaacgtctatatcatggccgacaagcagaagaacggcatcaaggtgaacttcaagatccgccacaacatcgaggacggcagcgtgcagctcgccgaccactaccagcagaacacccccatcggcgacggccccgtgctgctgcccgacaaccactacctgagcacccagtccgccctgagcaaagaccccaacgagaagcgcgatcacatggtcctgctggagttcgtgaccgccgccgggatcactctcggcatggacgagctgtacaagtaacttaagtttaaaccgctgatcagcctcgactgtgccttctagttgccagccatctgttgtttgcccctcccccgtgccttccttgaccctggaaggtgccactcccactgtcctttcctaataaaatgaggaaattgcatcgcattgtctgagtaggtgtcattctattctggggggtggggtggggcaggacagcaagggggaggattgggaagacaatagcaggcatgctggggatgcggtgggctctataattcacagtgtcgcgagttagactatgtaagcagaattttaatcatttttaaagagcccagtacttcatatccatttctcccgctccttctgcagccttatcaaaaggtattttagaacactcattttagccccattttcatttattatactggcttatccaacccctagacagagcattggcattttccctttcctgatcttagaagtctgatgactcatgaaaccagacagattagttacatacaccacaaatcgaggctgtagctggggcctcaacactgcagttcttttataactccttagtacactttttgttgatcctttgccttgatccttaattttcagtgtctatcacctctcccgtcaggtggtgttccacatttgggcctattctcagtccagggagttttacaacaatagatgtattgagaatccaacctaaagcttaactttccactcccatgaatgcctctctcctttttctccatttataaactgagctattaaccattaatggtttccaggtggatgtctcctccccc

SEQ ID NO: 169 - DNA, 2629 bp, synthetic construct
  source 1..2629: mol_type = other DNA
caactgttgtttgtttcagttgacacaaaccaaccagcacagctagttgtgcaacacccacctcccagcacctatgtccttccacattatttggagtggaagaagaatctttcctatgtgagttgaggcccttcagaccactctattacagttcagagagaaaccctccagtagacatactgtgtccatcctgcttttcattcctacttgtatctgaccaatcatctcccgaacaggaagttttgagcaggaaatgcaccttctgggtaccaagagcatgcatactaccgaacaataacttgttaaacctgtcaccatttcttacaagttgtcatttttctaccacctagtctggactgaccgctggagaggagtcagtccagctctggcaacggtgctgcttagtagggactgtctcttgactactaagaagagatttacattttgaaaactaccaagcacctgatttgaatttcagtgggccccaaactcagtattctctggaaaggcaagtgcagtagaaagcttatctataaaaggaaggcgtcctacgcaggaagaagcatgtcgcaccagcgagcaaatatctaagcaagtctgtaaagaggaaggacgtttgcttttgcagcacccattgggttggggtatggactgattgacagacaactttgccacttcctttttttcctatttcagatccctgctgaaccacagtgttctatcccagatctgtggtccatctgccctaaggacttgagctgcacctgtctcaaagggagctacttgcctcgagtctcatggtgtctaagggcgaagagctgatcaaggaaaatatgcgtatgaaggtggtcatggaaggttcggtcaacggccaccaattcaaatgcacaggtgaaggagaaggcaatccgtacatgggaactcaaaccatgaggatcaaagtcatcgagggaggacccctgccatttgcctttgacattcttgccacgtcgttcatgtatggcagccgtacttttatcaagtacccgaaaggcattcctgatttctttaaacagtcctttcctgagggttttacttgggaaagagttacgagatacgaagatggtggagtcgtcaccgtcatgcaggacaccagccttgaggatggctgtctcgtttaccacgtccaagtcagaggggtaaactttccctccaatggtcccgtgatgcagaagaagaccaagggttgggagcctaatacagagatgatgtatccagcagatggtggtctgaggggatacactcatatggcactgaaagttgatggtggtggccatctgtcttgctctttcgtaacaacttacaggtcaaaaaagaccgtcgggaacatcaagatgcccggtatccatgccgttgatcaccgcctggaaaggttagaggaaagtgacaatgaaatgttcgtagtacaacgcgaacacgcagttgccaagttcgccgggcttggtggtgggatggacgagctgtacaagtaatctagacccccaagggcgaattctgcagatatccatcacactggcggccgctcgagtctagagggcccgtttaaacccgctgatcagcctcgactgtgccttctagttgccagccatctgttgtttgcccctcccccgtgccttccttgaccctggaaggtgccactcccactgtcctttcctaataaaatgaggaaattgcatcgcattgtctgagtaggtgtcattctattctggggggtggggtggggcaggacagcaagggggaggattgggaagacaatagcaggcatgctggggatgcggtgggctctatggcctctgtgcttgctgcttctggtcttcggtaggtaagatgctcaaaaggcctggggtggtgccagggtgggactccctctgcttggtcagccctagacactcttcctgagcatatatctccccactgggggctaggggtagcactaggtttctccttctgatccaatattagcaagtataatgcaaatgggaactgagaaaagcagggttcccaagaaaaggaaaaggctctgtgtgtgtgtgtgtgtgtgtgtgtgtgtgtgtgtgtgtgtgtgtgtgtgtgtgtgttcttactaaaggctggtgatttgtctctattatttctgtttgatctctgtaaaaacagtaaattttcattaaaagagcttcaaaggtggtttctgttagagtgaacacatacacagcccaataaatcttacacccaaggcccggactctacttcaggctccaccatttttggctgagctcatatctccatacatttagacactacatagacttcaaacctggctgataatagttgatatcataggagcatatctacactgccccatacacagcaggaggtctagaaggcagaaaggaagagaactaacctcaatgaaatataagcaggcccattcctggcacctaggttgccctgtgtaggtaatttctcttaagcaaaataatctggacagtttcaaggtggagcccgcaaactggttatccaataccaagtggtcagccctgaaatcatatatatacaagtaacattacatggattgagcaggttgtattatatagagatgtatatgtgt

SEQ ID NO: 170 - DNA, 3718 bp, synthetic construct
  source 1..3718: mol_type = other DNA
agccacagtgagcctttaggtctgggcaggaagcttccagcagttcactcgctgtgagttctacctgtgacacctcaccatgaccccaggtgtcccctgaggtatttctctggcatcttggagggagcagatcgccttagggagataaggagagaactggattattgacgactcactcctctacaaacatttaatgaacgcctactgaatggagccttgtgctgagtattaggggtatggtaatatgtctggaccccatttctgccctgatggggagagaggaacctttccaaacatccacacaaaacctattttagggatgtgaaaatgagtaacaattagcgatggggccaagctctctctctttgtcagtaacgaggtcattcatcactcattgggtgacacctccatccccagcactgcttcgggttgtggggggcaaatgcatccatgaacccaagactagaggtgggtgtggaacaaggtaatggtggctaggggagcccccattctggtgagttggtaaagtatgatgggggtgtttcaatcccacagcggctccccctgaaaatcagagcgaggttccagagctccgccttaggggttgggcttctgccagccaagtaccgccccctctactccaagatgggatataaagtctcttagctccttccagagaagagtaagaagaaagaaaccatcacaggacctctaagggagagaggaattgtacactcacctccgtggcatctgtgggcattgcttgcctgcttagctgtagtgggggttcagcttgcatgcccaagaagaagaggaaggtggccaatttactgaccgtacaccaaaatttgcctgcattaccggtcgatgcaacgagtgatgaggttcgcaagaacctgatggacatgttcagggatcgccaggcgttttctgagcatacctggaaaatgcttctgtccgtttgccggtcgtgggcggcatggtgcaagttgaataaccggaaatggtttcccgcagaacctgaagatgttcgcgattatcttctatatcttcaggcgcgcggtctggcagtaaaaactatccagcaacatttgggccagctaaacatgcttcatcgtcggtccgggctgccacgaccaagtgacagcaatgctgtttcactggttatgcggcggatccgaaaagaaaacgttgatgccggtgaacgtgcaaaacaggctctagcgttcgaacgcactgatttcgaccaggttcgttcactcatggaaaatagcgatcgctgccaggatatacgtaatctggcatttctggggattgcttataacaccctgttacgtatagccgaaattgccaggatcagggttaaagatatctcacgtactgacggtgggagaatgttaatccatattggcagaacgaaaacgctggttagcaccgcaggtgtagagaaggcacttagcctgggggtaactaaactggtcgagcgatggatttccgtctctggtgtagctgatgatccgaataactacctgttttgccgggtcagaaaaaatggtgttgccgcgccatctgccaccagccagctatcaactcgcgccctggaagggatttttgaagcaactcatcgattgatttacggcgctaaggatgactctggtcagagatacctggcctggtctggacacagtgcccgtgtcggagccgcgcgagatatggcccgcgctggagtttcaataccggagatcatgcaagctggtggctggaccaatgtaaatattgtcatgaactatatccgtaacctggatagtgaaacaggggcaatggtgcgcctgctggaagatggcgatgggagtggagagggcaggggaagtcttctaacatgcggggacgtggaggaaaatcccggccccatggtgtctaagggcgaagagctgatcaaggaaaatatgcgtatgaaggtggtcatggaaggttcggtcaacggccaccaattcaaatgcacaggtgaaggagaaggcaatccgtacatgggaactcaaaccatgaggatcaaagtcatcgagggaggacccctgccatttgcctttgacattcttgccacgtcgttcatgtatggcagccgtacttttatcaagtacccgaaaggcattcctgatttctttaaacagtcctttcctgagggttttacttgggaaagagttacgagatacgaagatggtggagtcgtcaccgtcatgcaggacaccagccttgaggatggctgtctcgtttaccacgtccaagtcagaggggtaaactttccctccaatggtcccgtgatgcagaagaagaccaagggttgggagcctaatacagagatgatgtatccagcagatggtggtctgaggggatacactcatatggcactgaaagttgatggtggtggccatctgtcttgctctttcgtaacaacttacaggtcaaaaaagaccgtcgggaacatcaagatgcccggtatccatgccgttgatcaccgcctggaaaggttagaggaaagtgacaatgaaatgttcgtagtacaacgcgaacacgcagttgccaagttcgccgggcttggtggtgggatggacgagctgtacaagtgatctagagggccctattctatagtgtcacctaaatgctagagctcgctgatcagcctcgactgtgccttctagttgccagccatctgttgtttgcccctcccccgtgccttccttgaccctggaaggtgccactcccactgtcctttcctaataaaatgaggaaattgcatcgcattgtctgagtaggtgtcattctattctggggggtggggtggggcaggacagcaagggggaggattgggaagacaatagcaggcatgctggggatgcggtgggctctatggatgcagcagcttctggccctggtaggggccttagccacactcatcctcacccaacacgctgaaggcactgccccaggtaggagactgttaggtaccaaggcagaagattggtctaaagcaaggatgtggagggaaaacacttggatatagggagtctgtggtttctctggttactgagtctccatcttttgaacagcttcccccagtccagtggagatttcagtccttcgagactgcatagcagaggctaagctgctggtggacactgcctacaatcacacacagaaaaggtgagcctgggactgggaaggtcagtgagggaggacgggctctgggcaaaatcatcttacccaacctgaaccccaagaactatgggtctccctgctgggctgagaatttatggttagcctgcaccctcctccagcttcctctttctcctcctctttgggacagcatcatgcaacgtcttcgcagtggctcggccagccccatggacctcctggcctacttcaaacagccagtagcagccaccagaagagtggttcaggccgctgattatatgcatgtggccttagggctgctagaagagaggctgcagccacggggatctagacccttcaatgccactggtactctctttcctgctgagtccctaaggcctgccctagcctgggaatagaggaaagccagatgtgggaggtggggtgagaagcctaggggatgttagagatgacaaaggggtggaactgaacagcccaggtaagagataggactctggactcagaaccctgcctccctcctccccagatg

SEQ ID NO: 171 - DNA, 4730 bp, synthetic construct
  source 1..4730: mol_type = other DNA
ctcaattctttataataaagcacatttcaatcattttacatacacacacacccaaatctcttcacgaaattgttgccactattgtgactttcttcctgggagtatatctgcttctggatgggtccgcaagtgctttctgccacacctgaccctaatgtcattatatgaatatgtagtaacacacacttgcttggaagagttttggtagtaatcactcctgacagctcagagtatagaaccctggcggaggttccaacattgccgcctactggttaggcaggctccaagtcacacacccccatccccagtcttgtctcaagttctccacccgtaaactccaggtctaaaattctatccacgtgggtaaggatggatgcgcgacccgcagaaacaccctggctggcatcctgctttccccaactctgagaacattatccggccaggctctggacccatactgacttaaaacacaacagcagtggctcttggacttctgtttgcccgcgccctgcgccccgcccccgccagtctcctcccgccccgtccgagctgcgcatgcgccgccccgggagcgtgtttttataaaagtccggttcgggccagaaacttcaattttgttgcctggtgcagcaggtagcagtgaaacctctgaggcgtttggtgctccggtaaccaccacggctgtagagcgagtgttgccatggccaatttactgaccgtacaccaaaatttgcctgcattaccggtcgatgcaacgagtgatgaggttcgcaagaacctgatggacatgttcagggatcgccaggcgttttctgagcatacctggaaaatgcttctgtccgtttgccggtcgtgggcggcatggtgcaagttgaataaccggaaatggtttcccgcagaacctgaagatgttcgcgattatcttctatatcttcaggcgcgcggtctggcagtaaaaactatccagcaacatttgggccagctaaacatgcttcatcgtcggtccgggctgccacgaccaagtgacagcaatgctgtttcactggttatgcggcggatccgaaaagaaaacgttgatgccggtgaacgtgcaaaacaggctctagcgttcgaacgcactgatttcgaccaggttcgttcactcatggaaaatagcgatcgctgccaggatatacgtaatctggcatttctggggattgcttataacaccctgttacgtatagccgaaattgccaggatcagggttaaagatatctcacgtactgacggtgggagaatgttaatccatattggcagaacgaaaacgctggttagcaccgcaggtgtagagaaggcacttagcctgggggtaactaaactggtcgagcgatggatttccgtctctggtgtagctgatgatccgaataactacctgttttgccgggtcagaaaaaatggtgttgccgcgccatctgccaccagccagctatcaactcgcgccctggaagggatttttgaagcaactcatcgattgatttacggcgctaaggatgactctggtcagagatacctggcctggtctggacacagtgcccgtgtcggagccgcgcgagatatggcccgcgctggagtttcaataccggagatcatgcaagctggtggctggaccaatgtaaatattgtcatgaactatatccgtaacctggatagtgaaacaggggcaatggtgcgcctgctggaagatggcgatctcgagccatctgctggagacatgagagctgccaacctttggccaagcccgctcatgatcaaacgctctaagaagaacagcctggccttgtccctgacggccgaccagatggtcagtgccttgttggatgctgagccccccatactctattccgagtatgatcctaccagacccttcagtgaagcttcgatgatgggcttactgaccaacctggcagacagggagctggttcacatgatcaactgggcgaagagggtgccaggctttgtggatttgaccctccatgatcaggtccaccttctagaatgtgcctggctagagatcctgatgattggtctcgtctggcgctccatggagcacccagtgaagctactgtttgctcctaacttgctcttggacaggaaccagggaaaatgtgtagagggcatggtggagatcttcgacatgctgctggctacatcatctcggttccgcatgatgaatctgcagggagaggagtttgtgtgcctcaaatctattattttgcttaattctggagtgtacacatttctgtccagcaccctgaagtctctggaagagaaggaccatatccaccgagtcctggacaagatcacagacactttgatccacctgatggccaaggcaggcctgaccctgcagcagcagcaccagcggctggcccagctcctcctcatcctctcccacatcaggcacatgagtaacaaaggcatggagcatctgtacagcatgaagtgcaagaacgtggtgcccctctatgacctgctgctggaggcggcggacgcccaccgcctacatgcgcccactagccgtggaggggcatccgtggaggagacggaccaaagccacttggccactgcgggctctacttcatcgcattccttgcaaaagtattacatcacgggggaggcagagggtttccctgccacagcttgaccattaacgcgcgaccagcttgatatcgaattgggatccgcccctctccctcccccccccctaacgttactggccgaagccgcttggaataaggccggtgtgcgtttgtctatatgttattttccaccatattgccgtcttttggcaatgtgagggcccggaaacctggccctgtcttcttgacgagcattcctaggggtctttcccctctcgccaaaggaatgcaaggtctgttgaatgtcgtgaaggaagcagttcctctggaagcttcttgaagacaaacaacgtctgtagcgaccctttgcaggcagcggaaccccccacctggcgacaggtgcctctgcggccaaaagccacgtgtataagatacacctgcaaaggcggcacaaccccagtgccacgttgtgagttggatagttgtggaaagagtcaaatggctctcctcaagcgtattcaacaaggggctgaaggatgcccagaaggtaccccattgtatgggatctgatctggggcctcggtacacatgctttacatgtgtttagtcgaggttaaaaaaacgtctaggccccccgaaccacggggacgtggttttcctttgaaaaacacgatgataatatggccacaaccatggtgagcaagggcgaggagctgttcaccggggtggtgcccatcctggtcgagctggacggcgacgtaaacggccacaagttcagcgtgtccggcgagggcgagggcgatgccacctacggcaagctgaccctgaagttcatctgcaccaccggcaagctgcccgtgccctggcccaccctcgtgaccaccctgacctacggcgtgcagtgcttcagccgctaccccgaccacatgaagcagcacgacttcttcaagtccgccatgcccgaaggctacgtccaggagcgcaccatcttcttcaaggacgacggcaactacaagacccgcgccgaggtgaagttcgagggcgacaccctggtgaaccgcatcgagctgaagggcatcgacttcaaggaggacggcaacatcctggggcacaagctggagtacaactacaacagccacaacgtctatatcatggccgacaagcagaagaacggcatcaaggtgaacttcaagatccgccacaacatcgaggacggcagcgtgcagctcgccgaccactaccagcagaacacccccatcggcgacggccccgtgctgctgcccgacaaccactacctgagcacccagtccgccctgagcaaagaccccaacgagaagcgcgatcacatggtcctgctggagttcgtgaccgccgccgggatcactctcggcatggacgagctgtacaagtaagaaccgatcagtgtgagtgtaagtccacttgcatcctactttatagtaaacgtgcaaacgtgtgaacttagagctcagcccctttaaggagcgggttgaagcaactaaaaccttgaggggtgtcagggtcacaaggaggagcgggaactaatttttttttatgtgtgtgaacatggctatagggggaggaagataggaatatttttgccagtaagttgagtgggacgggttcagatggagctttcctaaggttgctcttgtttccctcccccttgagtcccgcggcgcgcgccgacttgcacgctgtttgcaaacgtcccagttttttgaaaaagggagaagggcttgccctctgtcccaagactcagaccatcgtctggtcctcctgaaaacaggagttttcttagagtttcttacattgtgtgaatttagagactttagtcggcacgcgtaggcactacattctgggtgagcttcgaaccggagcgtcttggagcggttcttggagttaggagtgcggttctgaaattccatagtgcagacagaggagcgcccgtcttcggcgggaaaagtgagctagtctgccgcgtcgcttgcctagagggggggcacaaactgcggcagccgcggagagaacgtcgctttgggatggagcagcagcgctttgcgggcatccgacccgccacttccccgcagtggc

SEQ ID NO: 172 - DNA, 3713 bp, synthetic construct
  source 1..3713: mol_type = other DNA
gctcatggagatcagaggaggctatcagatcccctggagcagggctgataagtgactgtgaagggcacagatgcgggtgctggggatagaagtcttttttttctttctaagataagattgtagaacagcaataagcttaaccagaccagtgtatgtctgtttcccccaaccagcaagcatgcatagagatatgctgttgctcctcctcctgttgaagaaatgggtgcaacctgagcaaagctaaggaagaaggagatgaagaaggagaagccagaacagcagcaagctctttgctttcctgtggagtcaggcagggccacggggggctgatttgtggttgtcgacgccttcagtcccaggcagcaggtgggatggaccaccgtgaccacaccacctcatttcctttgcccagttatcacactgagccatgacacggactggcttcaggatggaagatccgaccttagcttcacaactgtataaaaaaaaaaaaagacaactacacttcatctcatgctcacatttagtttcaatgacacattaaccacacagggagaagaaaaggccacaaggtctcatgttggtgtgaacaaggcaaaggaacttgtgtttaaatttaaaaaaaaaaaagagagagagagacagaaaatatcatcatcattgcaaagactttccgtgattccacacccaccccgaaagcccctcgcaacccaggaagtgtgctgaccattgagggtaataaaaggggctcctggggagtctgctccacattcttcttgcacagcccagcaagacctcagccatgcccaagaagaagaggaaggtggccaatttactgaccgtacaccaaaatttgcctgcattaccggtcgatgcaacgagtgatgaggttcgcaagaacctgatggacatgttcagggatcgccaggcgttttctgagcatacctggaaaatgcttctgtccgtttgccggtcgtgggcggcatggtgcaagttgaataaccggaaatggtttcccgcagaacctgaagatgttcgcgattatcttctatatcttcaggcgcgcggtctggcagtaaaaactatccagcaacatttgggccagctaaacatgcttcatcgtcggtccgggctgccacgaccaagtgacagcaatgctgtttcactggttatgcggcggatccgaaaagaaaacgttgatgccggtgaacgtgcaaaacaggctctagcgttcgaacgcactgatttcgaccaggttcgttcactcatggaaaatagcgatcgctgccaggatatacgtaatctggcatttctggggattgcttataacaccctgttacgtatagccgaaattgccaggatcagggttaaagatatctcacgtactgacggtgggagaatgttaatccatattggcagaacgaaaacgctggttagcaccgcaggtgtagagaaggcacttagcctgggggtaactaaactggtcgagcgatggatttccgtctctggtgtagctgatgatccgaataactacctgttttgccgggtcagaaaaaatggtgttgccgcgccatctgccaccagccagctatcaactcgcgccctggaagggatttttgaagcaactcatcgattgatttacggcgctaaggatgactctggtcagagatacctggcctggtctggacacagtgcccgtgtcggagccgcgcgagatatggcccgcgctggagtttcaataccggagatcatgcaagctggtggctggaccaatgtaaatattgtcatgaactatatccgtaacctggatagtgaaacaggggcaatggtgcgcctgctggaagatggcgatgggagtggagagggcaggggaagtcttctaacatgcggggacgtggaggaaaatcccggccccgtgtctaagggcgaagagctgatcaaggaaaatatgcgtatgaaggtggtcatggaaggttcggtcaacggccaccaattcaaatgcacaggtgaaggagaaggcaatccgtacatgggaactcaaaccatgaggatcaaagtcatcgagggaggacccctgccatttgcctttgacattcttgccacgtcgttcatgtatggcagccgtacttttatcaagtacccgaaaggcattcctgatttctttaaacagtcctttcctgagggttttacttgggaaagagttacgagatacgaagatggtggagtcgtcaccgtcatgcaggacaccagccttgaggatggctgtctcgtttaccacgtccaagtcagaggggtaaactttccctccaatggtcccgtgatgcagaagaagaccaagggttgggagcctaatacagagatgatgtatccagcagatggtggtctgaggggatacactcatatggcactgaaagttgatggtggtggccatctgtcttgctctttcgtaacaacttacaggtcaaaaaagaccgtcgggaacatcaagatgcccggtatccatgccgttgatcaccgcctggaaaggttagaggaaagtgacaatgaaatgttcgtagtacaacgcgaacacgcagttgccaagttcgccgggcttggtggtgggatggacgagctgtacaagtaatgatctagagggccctattctatagtgtcacctaaatgctagagctcgctgatcagcctcgactgtgccttctagttgccagccatctgttgtttgcccctcccccgtgccttccttgaccctggaaggtgccactcccactgtcctttcctaataaaatgaggaaattgcatcgcattgtctgagtaggtgtcattctattctggggggtggggtggggcaggacagcaagggggaggattgggaagacaatagcaggcatgctggggatgcggtgggctctatggagacttctcctcctgactttcctgggagtctgctgcctcaccccatgggttgtggaaggtaagctgagcagatattaatgggataaagaagaggtgggctcatatgctaggtttgacttgggttttgattagaataactgctttctccaggtaagcctcaaacttcatatacagaatgggaagtgctaatttcaactcagatagtttggactcatgtttatttatttaaagttgaatattctgtctatatatctcaacactgtgagctgaaattaaaatggaataatctgatttttttttactgatgattacttaagcacattaaatatccttagaatgatatttttattaattctggcaatgcttgcaaatgagtcttgcttttgtttacttaaaattgatttgataaattatcagactcttagagtttcttcacagtggggaatgtgctcaaaggcatatgttcagaagcaaatcaatgctttctacttgcaaaagacaagaaaaaggtgaccagaagttcataacttcatatcaagagaaccaatattattctcaactaaatggaggagtctgccaatattgttgagaatattataacttatgatagagttcttgagtttgtaagacagcctttgatactgagagtaacagataattcacagtgacaaatgagcctggaagatattcccaggtaagatgcaaaagcactgagctcattgttcggctgatgtttcctaaaaggtcaccttttcctactggctggagttgacttacagatctatttgtattctgttctg

SEQ ID NO: 173 - DNA, 4211 bp, synthetic construct
  source 1..4211: mol_type = other DNA
gcggccgccgctcctggccccgcaagcgcgccgccacacatacttgcagctacaccaactgcggcaagacctacaccaagagctcgcacctaaaggcgcatctgcgtacacacacaggtgggcgcctggcctcattcccgggatctgcggcagggggatggccgcgagttcaggaacaggctaggttacagaggaagaccctgtccatcctccagaagggaaatggatactgtccccagagtctatgacactgccaagggggtgtggcagtttaatgggttggctccgagggactcaggtctcaagaattcgggacataattaagaagctgtggagggctgggctggggcttagcactgcatataaagtttggcatggtggcctgagcctgtcatctcagtactgagcagaagaatcaggaattcagacctaatctcagaatgttaggggaggaatgcacctgagcctgctagtggtcagcttcaggagcccaaggttctctgtttagattagatgtgggatggagatgagagggagagggcagtgctatccggtgcagggtgcccagagcaggctttcggggaaattgaggctcaatgtcattcctctctgatgcaggtgagaagccttatcattgcaactgggaaggatgcggctggaagttcgcgcgctctgacgagcttacccgccactaccgaaagcacacaggtcacagaccctttcagtgccacttgtgcgaccgggccttctccaggtccgaccacctggccttgcacatgaagcgacacatgtagcctgggacgttactggccgaagccgcttggaataaggccggtgtgcgtttgtctatatgttattttccaccatattgccgtcttttggcaatgtgagggcccggaaacctggccctgtcttcttgacgagcattcctaggggtctttcccctctcgccaaaggaatgcaaggtctgttgaatgtcgtgaaggaagcagttcctctggaagcttcttgaagacaaacaacgtctgtagcgaccctttgcaggcagcggaaccccccacctggcgacaggtgcctctgcggccaaaagccacgtgtataagatacacctgcaaaggcggcacaaccccagtgccacgttgtgagttggatagttgtggaaagagtcaaatggctctcctcaagcgtattcaacaaggggctgaaggatgcccagaaggtaccccattgtatgggatctgatctggggcctcggtgcacatgctttacatgtgtttagtcgaggttaaaaaaacgtctaggccccccgaaccacggggacgtggttttcctttgaaaaacacgatgataatatatgcgcacaaccatgcccaagaagaagaggaaggtgacctctgatgaagtcaggaagaacctgatggacatgttcagggacaggcaggccttctctgaacacacctggaagatgctcctgtctgtgtgcagatcctgggctgcctggtgcaagctgaacaacaggaaatggttccctgctgaacctgaggatgtgagggactacctcctgtacctgcaagccagaggcctggctgtgaagaccatccaacagcacctgggccagctcaacatgctgcacaggagatctggcctgcctcgcccttctgactccaatgctgtgtccctggtgatgaggagaatcagaaaggagaatgtggatgctggggagagagccaagcaggccctggcctttgaacgcactgactttgaccaagtcagatccctgatggagaactctgacagatgccaggacatcaggaacctggccttcctgggcattgcctacaacaccctgctgcgcattgccgaaattgccagaatcagagtgaaggacatctcccgcaccgatggtgggagaatgctgatccacattggcaggaccaagaccctggtgtccacagctggtgtggagaaggccctgtccctgggggttaccaagctggtggagagatggatctctgtgtctggtgtggctgatgaccccaacaactacctgttctgccgggtcagaaagaatggtgtggctgccccttctgccacctcccaactgtccacccgggccctggaagggatctttgaggccacccaccgcctgatctatggtgccaaggatgactctgggcagagatacctggcctggtctggacactctgccagagtgggtgctgccagggacatggcgagggctggtgtgtccatccctgaaatcatgcaggctggtggctggaccaatgtgaacattgtgatgaactacatcagaaacctggactctgagactggggccatggtgaggctgctcgaggatggggacggaagcggagctactaacttcagcctgctgaagcaggctggagacgtggaggagaaccctggacctatgagctttccatgtaaatttgtagccagcttccttctgattttcaatgtttcttccaaaggtgcagtctccaaagagattacgaatgccttggaaacctggggtgccttgggtcaggacatcaacttggacattcctagttttcaaatgagtgatgatattgacgatataaaatgggaaaaaacttcagacaagaaaaagattgcacaattcagaaaagagaaagagactttcaaggaaaaagatacatataagctatttaaaaatggaactctgaaaattaagcatctgaagaccgatgatcaggatatctacaaggtatcaatatatgatacaaaaggaaaaaatgtgttggaaaaaatatttgatttgaagattcaagagagggtctcaaaaccaaaaatctcctggacttgtatcaacacaaccctgacctgtgaggtaatgaatggaactgaccccgaattaaacctgtatcaagatgggaaacatctaaaactttctcagagggtcatcacacacaagtggaccaccagcctgagtgcaaaattcaagtgcacagcagggaacaaagtcagcaaggaatccagtgtcgagcctgtcagctgtccagagaaaggtctggacatctatctcatcattggcatatgtggaggaggcagcctcttgatggtctttgtggcactgctcgttttctatatcaccaaaaggaaaaaacagaggtagtctagagggccctattctatagtgtcacctaaatgctagagctcgctgatcagcctcgactgtgccttctagttgccagccatctgttgtttgcccctcccccgtgccttccttgaccctggaaggtgccactcccactgtcctttcctaataaaatgaggaaattgcatcgcattgtctgagtaggtgtcattctattctggggggtggggtggggcaggacagcaagggggaggattgggaagacaatagcaggcatgctggggatgcggtgggctctatggtcgactcggctagcccatgcgcgactgtggcaggttccacgcgcggggcacggtccccttgcaaacagactgctatttattggaccttaggacagagccggacaagtgtggccacaggaaaatgactctgccaccagttctggcccccacagtgactgaaggccccaggaaagaagacaggagtctgtgaagaatgttttcaaaatggtgcaataattgacttatttccctcgggtccccactagaggatcgaggctagatgccttgtgagaaatgcctttgagtttactgtccccaacgtttttataatattgtatataagactatgaccgattgtatttctataagggagacgatggcatctctgccgcctgcttcgtttttatacgacttttttttaattaaagttttggatctttggaggaatcacggtagtggtgtggctggggatagggtaggtcctgaggggacagggagcagtcagtgcctgtggccaaggtcaccagctgcagcccccagctgccaaggcctgtgggttcgctataaatgtaaacatggtgttttaggattgagcacaggttatttttaagtctgctactttgagccataatttgccccacccccaccccctgtatcccaagtgggaaaagccttggctccactgatgtggctgaccattcctttttttagaaagaaaaatagaaaagaaaattaaaaaccttttcctggtaccatcttggggtttagccaaacttatggagcgtgcaggt

SEQ ID NO: 174 - DNA, 4241 bp, synthetic construct
  source 1..4241: mol_type = other DNA
atgtctcagaacaaacacaaaggggtgactcttgaggaatgaccaaggttatcctctgatgcccacattcaggcatacacatgtgtacctgcatacacacacatgagtaaacacacacacaattaactatgtaaaatgattaagccactagatatgatggcacaagccactcagtatttgggaggccaaagcagatggatctctatgagtttgaggccatcttggtctacataatgagttccaggatagctagggctacataataaaaaaaaataaaaataaaaaaaggtaagtaatttaataaataaataaatgccaccaagatagagtgggaggggtctagttagaagataattgggtatgggttggggaggaaattcctgcaatgttataggccatagggggagaggcccatgggcttagtctcaagagagcaggtcaagccctcagttcaaggctacttcttgggctctgtatttatcacactggtcattcaggcagtccttctccttgtccttgcatagatctctgtggacacagacctgggtaagagacagtcacatagcacagggcattattgtaaccttctgggaagtgagcttactgtgactctgtcccttacaggtctcttctgagcagcccccacttctggatcctggtgtctctgaagttgcccctgttcctgagcatgcttggtgccttgctctgggtgaacaggcctcagaggtgctctgggggaagcagcgcttggccctgttatgagaaccagtgaagtctgtcatcaaggccctgtccctggaacgttactggccgaagccgcttggaataaggccggtgtgcgtttgtctatatgttattttccaccatattgccgtcttttggcaatgtgagggcccggaaacctggccctgtcttcttgacgagcattcctaggggtctttcccctctcgccaaaggaatgcaaggtctgttgaatgtcgtgaaggaagcagttcctctggaagcttcttgaagacaaacaacgtctgtagcgaccctttgcaggcagcggaaccccccacctggcgacaggtgcctctgcggccaaaagccacgtgtataagatacacctgcaaaggcggcacaaccccagtgccacgttgtgagttggatagttgtggaaagagtcaaatggctctcctcaagcgtattcaacaaggggctgaaggatgcccagaaggtaccccattgtatgggatctgatctggggcctcggtgcacatgctttacatgtgtttagtcgaggttaaaaaaacgtctaggccccccgaaccacggggacgtggttttcctttgaaaaacacgatgataatatatgcgcacaaccatgcccaagaagaagaggaaggtgacctctgatgaagtcaggaagaacctgatggacatgttcagggacaggcaggccttctctgaacacacctggaagatgctcctgtctgtgtgcagatcctgggctgcctggtgcaagctgaacaacaggaaatggttccctgctgaacctgaggatgtgagggactacctcctgtacctgcaagccagaggcctggctgtgaagaccatccaacagcacctgggccagctcaacatgctgcacaggagatctggcctgcctcgcccttctgactccaatgctgtgtccctggtgatgaggagaatcagaaaggagaatgtggatgctggggagagagccaagcaggccctggcctttgaacgcactgactttgaccaagtcagatccctgatggagaactctgacagatgccaggacatcaggaacctggccttcctgggcattgcctacaacaccctgctgcgcattgccgaaattgccagaatcagagtgaaggacatctcccgcaccgatggtgggagaatgctgatccacattggcaggaccaagaccctggtgtccacagctggtgtggagaaggccctgtccctgggggttaccaagctggtggagagatggatctctgtgtctggtgtggctgatgaccccaacaactacctgttctgccgggtcagaaagaatggtgtggctgccccttctgccacctcccaactgtccacccgggccctggaagggatctttgaggccacccaccgcctgatctatggtgccaaggatgactctgggcagagatacctggcctggtctggacactctgccagagtgggtgctgccagggacatggcgagggctggtgtgtccatccctgaaatcatgcaggctggtggctggaccaatgtgaacattgtgatgaactacatcagaaacctggactctgagactggggccatggtgaggctgctcgaggatggggacggaagcggagctactaacttcagcctgctgaagcaggctggagacgtggaggagaaccctggacctatgagctttccatgtaaatttgtagccagcttccttctgattttcaatgtttcttccaaaggtgcagtctccaaagagattacgaatgccttggaaacctggggtgccttgggtcaggacatcaacttggacattcctagttttcaaatgagtgatgatattgacgatataaaatgggaaaaaacttcagacaagaaaaagattgcacaattcagaaaagagaaagagactttcaaggaaaaagatacatataagctatttaaaaatggaactctgaaaattaagcatctgaagaccgatgatcaggatatctacaaggtatcaatatatgatacaaaaggaaaaaatgtgttggaaaaaatatttgatttgaagattcaagagagggtctcaaaaccaaaaatctcctggacttgtatcaacacaaccctgacctgtgaggtaatgaatggaactgaccccgaattaaacctgtatcaagatgggaaacatctaaaactttctcagagggtcatcacacacaagtggaccaccagcctgagtgcaaaattcaagtgcacagcagggaacaaagtcagcaaggaatccagtgtcgagcctgtcagctgtccagagaaaggtctggacatctatctcatcattggcatatgtggaggaggcagcctcttgatggtctttgtggcactgctcgttttctatatcaccaaaaggaaaaaacagaggtagtctagagggccctattctatagtgtcacctaaatgctagagctcgctgatcagcctcgactgtgccttctagttgccagccatctgttgtttgcccctcccccgtgccttccttgaccctggaaggtgccactcccactgtcctttcctaataaaatgaggaaattgcatcgcattgtctgagtaggtgtcattctattctggggggtggggtggggcaggacagcaagggggaggattgggaagacaatagcaggcatgctggggatgcggtgggctctatggcacagctcctctagtggctgagaagagccaggaaatgtgtattttttagaatgctctgaaacttttagaagattctttgtgctgtattaaacacatagagaatttacccaataaacacctatatatttaaataatttcgggctagagaaatggctcaatggtaccagctgctcatccagaagtcctatattcaattcccagtaaccccatggtggctcacagccatctgtaaaaagacctgatgccctcttctggcatgcaggtgtacattcagatgaaacactcatataaataaataaataaataaatctctttaaataaaattaagtagatttttaattggatacctttcattattccatggtaagttcacacttgtgtacaacatgactgtatcatatccacctcgaccccaccatcccacccccttagtcatgtgttccctgttccccttcaagtctcctctccccccaccccccgccaccgacatttcttttattctttctgtaactctctggtaacagtgcagcctgatggaacactagctgatcttgcagacttggtcttgtgcaggtaaacaaagctgccgtgaactcttgatcaagagacaatgccacacacagaaaacagcattcagggcactctcctcctcaacctctggctgtggaattttttcttctccctccctaccatgggttgggatgagggtgttttaggctaagagcttgatggtcacttacaccacagcagaaggaagcagctccaaccaaggccaaagatagcaccacttaaaggtctag

SEQ ID NO: 175 - DNA, 4241 bp, synthetic construct
  source 1..4241: mol_type = other DNA
ggtgagtgaccattagatcctgggggttcaaactttcgtggcaagccaggacaattccttgaacatcccctttgaatctgatctacataagtgagcccaggttagccaggactacatagtgagactctgtatcaaaagcaaaataaaacaatgtatcaaaattataattttaaaacttaagtggtatcaagtttcaaccaacgaaccaacgaaggaatgaaccaaccaaccaacctttatgtgttaaagccaaagagaatttctgatgtgaccttctcaaatatatgtttgttctatggcttcatttctctttcatttccacaccagaacaatcaagtacagaataaaaaagtagcctcagaaagcacgaaatgttttccttttggccttcgacacctgaagcaaaaatagattgtttctcagtgttggcacatttgtgtttcaaaaggaaatgaaacccatggactgttaggaaattacttctcattatactggtggtcctaaaaccatagtttgccttcaggctgatacctctaagtttctgttacagttttgatgatttagtttctggtgataatctatcactgtacaagacacacagtaggttgacatgacctctcatttgttttgcagatacctcagattagctatgcatctacagccccagagctaagtgacaacaccaggtatgatttcttttctcgggtggtcccgcctgactcctaccaagcccaagccatggtggacattgtgacagccctgggatggaattatgtgtcaacactggcttccgaggggaaacgttactggccgaagccgcttggaataaggccggtgtgcgtttgtctatatgttattttccaccatattgccgtcttttggcaatgtgagggcccggaaacctggccctgtcttcttgacgagcattcctaggggtctttcccctctcgccaaaggaatgcaaggtctgttgaatgtcgtgaaggaagcagttcctctggaagcttcttgaagacaaacaacgtctgtagcgaccctttgcaggcagcggaaccccccacctggcgacaggtgcctctgcggccaaaagccacgtgtataagatacacctgcaaaggcggcacaaccccagtgccacgttgtgagttggatagttgtggaaagagtcaaatggctctcctcaagcgtattcaacaaggggctgaaggatgcccagaaggtaccccattgtatgggatctgatctggggcctcggtgcacatgctttacatgtgtttagtcgaggttaaaaaaacgtctaggccccccgaaccacggggacgtggttttcctttgaaaaacacgatgataatatatgcgcacaaccatgcccaagaagaagaggaaggtgacctctgatgaagtcaggaagaacctgatggacatgttcagggacaggcaggccttctctgaacacacctggaagatgctcctgtctgtgtgcagatcctgggctgcctggtgcaagctgaacaacaggaaatggttccctgctgaacctgaggatgtgagggactacctcctgtacctgcaagccagaggcctggctgtgaagaccatccaacagcacctgggccagctcaacatgctgcacaggagatctggcctgcctcgcccttctgactccaatgctgtgtccctggtgatgaggagaatcagaaaggagaatgtggatgctggggagagagccaagcaggccctggcctttgaacgcactgactttgaccaagtcagatccctgatggagaactctgacagatgccaggacatcaggaacctggccttcctgggcattgcctacaacaccctgctgcgcattgccgaaattgccagaatcagagtgaaggacatctcccgcaccgatggtgggagaatgctgatccacattggcaggaccaagaccctggtgtccacagctggtgtggagaaggccctgtccctgggggttaccaagctggtggagagatggatctctgtgtctggtgtggctgatgaccccaacaactacctgttctgccgggtcagaaagaatggtgtggctgccccttctgccacctcccaactgtccacccgggccctggaagggatctttgaggccacccaccgcctgatctatggtgccaaggatgactctgggcagagatacctggcctggtctggacactctgccagagtgggtgctgccagggacatggcgagggctggtgtgtccatccctgaaatcatgcaggctggtggctggaccaatgtgaacattgtgatgaactacatcagaaacctggactctgagactggggccatggtgaggctgctcgaggatggggacggaagcggagctactaacttcagcctgctgaagcaggctggagacgtggaggagaaccctggacctatgagctttccatgtaaatttgtagccagcttccttctgattttcaatgtttcttccaaaggtgcagtctccaaagagattacgaatgccttggaaacctggggtgccttgggtcaggacatcaacttggacattcctagttttcaaatgagtgatgatattgacgatataaaatgggaaaaaacttcagacaagaaaaagattgcacaattcagaaaagagaaagagactttcaaggaaaaagatacatataagctatttaaaaatggaactctgaaaattaagcatctgaagaccgatgatcaggatatctacaaggtatcaatatatgatacaaaaggaaaaaatgtgttggaaaaaatatttgatttgaagattcaagagagggtctcaaaaccaaaaatctcctggacttgtatcaacacaaccctgacctgtgaggtaatgaatggaactgaccccgaattaaacctgtatcaagatgggaaacatctaaaactttctcagagggtcatcacacacaagtggaccaccagcctgagtgcaaaattcaagtgcacagcagggaacaaagtcagcaaggaatccagtgtcgagcctgtcagctgtccagagaaaggtctggacatctatctcatcattggcatatgtggaggaggcagcctcttgatggtctttgtggcactgctcgttttctatatcaccaaaaggaaaaaacagaggtagtctagagggccctattctatagtgtcacctaaatgctagagctcgctgatcagcctcgactgtgccttctagttgccagccatctgttgtttgcccctcccccgtgccttccttgaccctggaaggtgccactcccactgtcctttcctaataaaatgaggaaattgcatcgcattgtctgagtaggtgtcattctattctggggggtggggtggggcaggacagcaagggggaggattgggaagacaatagcaggcatgctggggatgcggtgggctctatggctatggagagagtggtgttgaggccttcactcagatctcaagggagattggtgagcatgtatttatcagttggttgaatttggaggtgacaggttgctaaaatatgcacacctccaagtgctgtctgatgtatatgagataattagaattctctcaaatgcggggcccaggctgtgctctgtatggggaagcttaggcgtattgtagatggttttattgttcttatttctagcaaggtgactctttggtgctaatttgagcagtagagctcctgacttcggtgagtatcttttgagttgtctgttttgatgagggagtttgcaggcaccttagagccacagtgaatttgaataaatgacatactgtttgattgttctagatagaagtttacattagcaagtcatcaaattaaaaaaaaaagtcagtggaatttaacaggggacactagagggatcagtgcttgtaatcatcttaaagcaatattagatcagcccccaggggtagtcctaagtcatactctccttgtcatatttgactttttccatctttcatttgtatataaaagtgtagagcttccagagggatgaaggggaaattgtgaaaacttagttaggacaaagtgctgcaagatcctgtcctgggagttcttcaaagagcatttccagtctctgtagctattttatcaacatgtatatttatctgtgaggctgtaaatccattctattacttagaaaaaacagatcagggcaacagaaagcagcatacagcaaactcttactgacaattagtcagtgatatat

SEQ ID NO: 176 - DNA, 4589 bp, synthetic construct
  source 1..4589: mol_type = other DNA
agcttaaaactgaagccctgcttctttggatagtccattccgatgcataaatatagaagtgtgttggacaacccctgagcagccacatacctgtgcaccaaccacatcaccacagcatcttatgtggaagagctcatcggggaaatggaatgtgtttcgtgcacttagtagatcctaaaattgacaacagagtcccctgagccacatgaagcccctccccagacccctaggaattcctggattctccctattccttctccacaggcaggtttcatcctgtgggtcacctctagcctaccaccttcctcctctttccaaggaatcaagagacctccttcccacccacctccattcttctcctcctggcctgcgttctcctgagcaagtttcttgcagccagcatcctctgggctgtggccaggggcaggcagaagccgggaacacctgtggtcagagggctggactgtggccaagatgctgggcaccaacttcagatcctcactggtgagtggggcaagccaagggggacattgggcatggatggggggagcgatgggagccttgagaggtatctgttgcaggacccggaggtacgtgagagaattctgagtgggaggagaactacagcttaagtccagccacgttactggccgaagccgcttggaataaggccggtgtgcgtttgtctatatgttattttccaccatattgccgtcttttggcaatgtgagggcccggaaacctggccctgtcttcttgacgagcattcctaggggtctttcccctctcgccaaaggaatgcaaggtctgttgaatgtcgtgaaggaagcagttcctctggaagcttcttgaagacaaacaacgtctgtagcgaccctttgcaggcagcggaaccccccacctggcgacaggtgcctctgcggccaaaagccacgtgtataagatacacctgcaaaggcggcacaaccccagtgccacgttgtgagttggatagttgtggaaagagtcaaatggctctcctcaagcgtattcaacaaggggctgaaggatgcccagaaggtaccccattgtatgggatctgatctggggcctcggtgcacatgctttacatgtgtttagtcgaggttaaaaaaacgtctaggccccccgaaccacggggacgtggttttcctttgaaaaacacgatgataatatatgcgcacaaccatgacctctgatgaagtcaggaagaacctgatggacatgttcagggacaggcaggccttctctgaacacacctggaagatgctcctgtctgtgtgcagatcctgggctgcctggtgcaagctgaacaacaggaaatggttccctgctgaacctgaggatgtgagggactacctcctgtacctgcaagccagaggcctggctgtgaagaccatccaacagcacctgggccagctcaacatgctgcacaggagatctggcctgcctcgcccttctgactccaatgctgtgtccctggtgatgaggagaatcagaaaggagaatgtggatgctggggagagagccaagcaggccctggcctttgaacgcactgactttgaccaagtcagatccctgatggagaactctgacagatgccaggacatcaggaacctggccttcctgggcattgcctacaacaccctgctgcgcattgccgaaattgccagaatcagagtgaaggacatctcccgcaccgatggtgggagaatgctgatccacattggcaggaccaagaccctggtgtccacagctggtgtggagaaggccctgtccctgggggttaccaagctggtggagagatggatctctgtgtctggtgtggctgatgaccccaacaactacctgttctgccgggtcagaaagaatggtgtggctgccccttctgccacctcccaactgtccacccgggccctggaagggatctttgaggccacccaccgcctgatctatggtgccaaggatgactctgggcagagatacctggcctggtctggacactctgccagagtgggtgctgccagggacatggcgagggctggtgtgtccatccctgaaatcatgcaggctggtggctggaccaatgtgaacattgtgatgaactacatcagaaacctggactctgagactggggccatggtgaggctgctcgaggatggggacctcgagccatctgctggagacatgagagctgccaacctttggccaagcccgctcatgatcaaacgctctaagaagaacagcctggccttgtccctgacggccgaccagatggtcagtgccttgttggatgctgagccccccatactctattccgagtatgatcctaccagacccttcagtgaagcttcgatgatgggcttactgaccaacctggcagacagggagctggttcacatgatcaactgggcgaagagggtgccaggctttgtggatttgaccctccatgatcaggtccaccttctagaatgtgcctggctagagatcctgatgattggtctcgtctggcgctccatggagcacccagtgaagctactgtttgctcctaacttgctcttggacaggaaccagggaaaatgtgtagagggcatggtggagatcttcgacatgctgctggctacatcatctcggttccgcatgatgaatctgcagggagaggagtttgtgtgcctcaaatctattattttgcttaattctggagtgtacacatttctgtccagcaccctgaagtctctggaagagaaggaccatatccaccgagtcctggacaagatcacagacactttgatccacctgatggccaaggcaggcctgaccctgcagcagcagcaccagcggctggcccagctcctcctcatcctctcccacatcaggcacatgagtaacaaaggcatggagcatctgtacagcatgaagtgcaagaacgtggtgcccctctatgacctgctgctggaggcggcggacgcccaccgcctacatgcgcccactagccgtggaggggcatccgtggaggagacggaccaaagccacttggccactgcgggctctacttcatcgcattccttgcaaaagtattacatcacgggggaggcagagggtttccctgccacagctggaagcggagctactaacttcagcctgctgaagcaggctggagacgtggaggagaaccctggacctgtgtctaagggcgaagagctgatcaaggaaaatatgcgtatgaaggtggtcatggaaggttcggtcaacggccaccaattcaaatgcacaggtgaaggagaaggcaatccgtacatgggaactcaaaccatgaggatcaaagtcatcgagggaggacccctgccatttgcctttgacattcttgccacgtcgttcatgtatggcagccgtacttttatcaagtacccgaaaggcattcctgatttctttaaacagtcctttcctgagggttttacttgggaaagagttacgagatacgaagatggtggagtcgtcaccgtcatgcaggacaccagccttgaggatggctgtctcgtttaccacgtccaagtcagaggggtaaactttccctccaatggtcccgtgatgcagaagaagaccaagggttgggagcctaatacagagatgatgtatccagcagatggtggtctgaggggatacactcatatggcactgaaagttgatggtggtggccatctgtcttgctctttcgtaacaacttacaggtcaaaaaagaccgtcgggaacatcaagatgcccggtatccatgccgttgatcaccgcctggaaaggttagaggaaagtgacaatgaaatgttcgtagtacaacgcgaacacgcagttgccaagttcgccgggcttggtggtgggatggacgagctgtacaagtaaaggagtcaatccagcctgcatgctctcccctcctccaccaagacttctgtttctgctacttttgcttcagaggccgcctctgcctcaagcccacctatcctgggagcaggaatactggtgtgtacatctgtgttgagtggggaagacagctggatggttgtctgtcaacttctgcactttggacattaaacattctccacacaccaacccaggactgcctactctttctagatggttctgtgtgggtctatgttctgccccactgctgaggtgttgggtacagctgctggggaggtgaaacccagggagtgcttgcctatgtctccccgttctactgccattggctgttgggctttagggaagtgctgagacaccactcagggagtgggagaatgcagtctgagatgtggcaggtcaaagttggggttctctggctcctggtaatccagtcgccactggagtgccacagaggagttaggaatgaaggaatgggggtccatgggcccttgatgaggctgggaccattgggggcccgcaggctgaggacaatgataaacctggggctgggggaacagggatttctggcttagatgtcagtgaaactccttagcttagcagcagttgtttggaagcacatggaggccttctgtggaagatttaggcagtgtctttgtagt

SEQ ID NO: 177 - DNA, 2371 bp, synthetic construct
  source 1..2371: mol_type = other DNA
tcttcatggcctctaacagtctaacttgctatgtaaccttgaaacaaccttgaacttttgatccttctgtttctatctcacactttatgagatgagagttacacaccagtttctatagtgcttgggatttgaaaccagggccttgtgtatgctggtcaagaactctaataactgagtcagagccccagttcctcagggctccattgcacagctgagtaaaccaactcccattactagatatagcttggagcaaggacattgtcataaaaatatacagcaaaactcctggcccagactggcacctttttagctgtgtaaagcaatgtctctctccccatgtctcttttccggggtgagggtgtccccatcctgttccctttttttcccctgagtcagagaagaatcgacctcacagagggtgctgcagagggccatggggttatataaatcccagggcagagggaaggtggagaggagggagtcaagagaagcagaggatggtgcccaagaagaagaggaaagtctccaacctgctgactgtgcaccaaaacctgcctgccctccctgtggatgccacctctgatgaagtcaggaagaacctgatggacatgttcagggacaggcaggccttctctgaacacacctggaagatgctcctgtctgtgtgcagatcctgggctgcctggtgcaagctgaacaacaggaaatggttccctgctgaacctgaggatgtgagggactacctcctgtacctgcaagccagaggcctggctgtgaagaccatccaacagcacctgggccagctcaacatgctgcacaggagatctggcctgcctcgcccttctgactccaatgctgtgtccctggtgatgaggagaatcagaaaggagaatgtggatgctggggagagagccaagcaggccctggcctttgaacgcactgactttgaccaagtcagatccctgatggagaactctgacagatgccaggacatcaggaacctggccttcctgggcattgcctacaacaccctgctgcgcattgccgaaattgccagaatcagagtgaaggacatctcccgcaccgatggtgggagaatgctgatccacattggcaggaccaagaccctggtgtccacagctggtgtggagaaggccctgtccctgggggttaccaagctggtggagagatggatctctgtgtctggtgtggctgatgaccccaacaactacctgttctgccgggtcagaaagaatggtgtggctgccccttctgccacctcccaactgtccacccgggccctggaagggatctttgaggccacccaccgcctgatctatggtgccaaggatgactctgggcagagatacctggcctggtctggccactctgccagagtgggtgctgccagggacatggccagggctggtgtgtccatccctgaaatcatgcaggctggtggctggaccaatgtgaacattgtgatgaactacatcagaaacctggactctgagactggggccatggtgaggctgctcgaggatggggactgatctagacccccaagggcgaattctgcagatatccatcacactggcggccgctcgagtctagagggcccgtttaaacccgctgatcagcctcgactgtgccttctagttgccagccatctgttgtttgcccctcccccgtgccttccttgaccctggaaggtgccactcccactgtcctttcctaataaaatgaggaaattgcatcgcattgtctgagtaggtgtcattctattctggggggtggggtggggcaggacagcaagggggaggattgggaagacaatagcaggcatgctggggatgcggtgggctctatgggcaggagagccagagttccatcagtcaaagaatcatggtgaggctgggtaccaactaggggaagcagggtccaggatccaggatccaggatccagagagatctggtcctggcctccagcttgggagaggtggtgatgagggaggtggctgagctttgaaggtcagctgcgtatcttctgccccattcagaggaggaggtcacatctggagagcagggatttgctgagcatgaccccgagggtctcatttgcagctccaagagtttacaaggtaccaggatgactcaggggcagaggtgtcagggattctctgcagaaggaacacggcagagcaggatctgctccctgggagctcagctctgcccatctgtcggttgtgcagggcatctgacccaagtcccctggcttctgctgcttctcatctctttgggcctctttttgcttatgttggccaccctggttcaaggtaagtcagagcagggctgggagagggtgacagga

SEQ ID NO: 178 - DNA, 947 bp, synthetic construct
  source 1..947: mol_type = other DNA
gatcaggacagcaaagacagcacctacagcatgagcagcaccctcacgttgaccaaggacgagtatgaacgacataacagctatacctgtgaggccactcacaagacatcaacttcacccattgtcaagagcttcaacaggaatgagtgtataacttcgtatagcatacattatacgaagttattaactttaaataattggcattatttaaagttatcgggtggcgactacaaagacgatgacgacaagtagtgataagatacattgatgagtttggacaaaccacaactagaatgcagtgaaaaaaatgctttatttgtgaaatttgtgatgctattgctttatttgtaaccattataagctgcaataaacaagttaacaacaacaattgcattcattttatgtttcaggttcagggggagatgtgggaggttttttataactttaaataattggcattatttaaagttatcgggtggctggagccaccctcagtttgagaagtagtgataagatacattgatgagtttggacaaaccacaactagaatgcagtgaaaaaaatgctttatttgtgaaatttgtgatgctattgctttatttgtaaccattataagctgcaataaacaagttaacaacaacaattgcattcattttatgtttcaggttcagggggagatgtgggaggttttttaataacttcgtatagcatacattatacgaagttatctggaagcggtaagcctatccctaaccctctcctcggtctcgattctacgtagagacaaaggtactgagacgccaccaccagctccccagctccatcctatcttcccttctaaggtcttggaggcttccccacaagcgacctaccactgttgcggtgctccaaacctcctccccacctccttctcctcctcctccctttccttggcttttatcatgcta

SEQ ID NO: 179 - DNA, 3051 bp, synthetic construct
  source 1..3051: mol_type = other DNA
cgtggaagctgctgggtatgggactggagctgttctttgggttcttcacccctttgctgtttatggtgttctgctatctgttcattatcaagaccttggtgcaggcccagaactccaagaggcacagagcaatccgagtcgtgatcgctgtggttctcgtgttcctggcttgtcagatccctcacaacatggtcctcctcgtgactgcggtcaacacgggcaaagtgggccggagctgcagcaccgagaaagtcctcgcctacaccaggaacgtggccgaggtcctggctttcctgcattgctgcctcaaccccgtgttgtatgcgtttattggacagaaattcagaaactacttcatgaagatcatgaaggatgtgtggtgtatgagaaggaagaataagatgcctggcttcctctgtgcccgggtttactcggaaagctacatctccaggcagaccagtgagaccgtcgaaaatgataatgcatcgtcctttaccatgggcagcgccacgaacttctctctgttaaagcaagcaggagacgtggaagaaaaccccggtcctggcagcgtgtccaacctgctgactgtgcaccaaaacctgcctgccctccctgtggatgccacctctgatgaagtcaggaagaacctgatggacatgttcagggacaggcaggccttctctgaacacacctggaagatgctcctgtctgtgtgcagatcctgggctgcctggtgcaagctgaacaacaggaaatggttccctgctgaacctgaggatgtgagggactacctcctgtacctgcaagccagaggcctggctgtgaagaccatccaacagcacctgggccagctcaacatgctgcacaggagatctggcctgcctcgcccttctgactccaatgctgtgtccctggtgatgaggagaatcagaaaggagaatgtggatgctggggagagagccaagcaggccctggcctttgaacgcactgactttgaccaagtcagatccctgatggagaactctgacagatgccaggacatcaggaacctggccttcctgggcattgcctacaacaccctgctgcgcattgccgaaattgccagaatcagagtgaaggacatctcccgcaccgatggtgggagaatgctgatccacattggcaggaccaagaccctggtgtccacagctggtgtggagaaggccctgtccctgggggttaccaagctggtggagagatggatctctgtgtctggtgtggctgatgaccccaacaactacctgttctgccgggtcagaaagaatggtgtggctgccccttctgccacctcccaactgtccacccgggccctggaagggatctttgaggccacccaccgcctgatctatggtgccaaggatgactctgggcagagatacctggcctggtctggccactctgccagagtgggtgctgccagggacatggccagggctggtgtgtccatccctgaaatcatgcaggctggtggctggaccaatgtgaacattgtgatgaactacatcagaaacctggactctgagactggggccatggtgaggctgctcgaagatggggacctcgagccatctgctggagacatgagagctgccaacctttggccaagcccgctcatgatcaaacgctctaagaagaacagcctggccttgtccctgacggccgaccagatggtcagtgccttgttggatgctgagccccccatactctattccgagtatgatcctaccagacccttcagtgaagcttcgatgatgggcttactgaccaacctggcagacagggagctggttcacatgatcaactgggcgaagagggtgccaggctttgtggatttgaccctccatgatcaggtccaccttctagaatgtgcctggctagagatcctgatgattggtctcgtctggcgctccatggagcacccagtgaagctactgtttgctcctaacttgctcttggacaggaaccagggaaaatgtgtagagggcatggtggagatcttcgacatgctgctggctacatcatctcggttccgcatgatgaatctgcagggagaggagtttgtgtgcctcaaatctattattttgcttaattctggagtgtacacatttctgtccagcaccctgaagtctctggaagagaaggaccatatccaccgagtcctggacaagatcacagacactttgatccacctgatggccaaggcaggcctgaccctgcagcagcagcaccagcggctggcccagctcctcctcatcctctcccacatcaggcacatgagtaacaaaggcatggagcatctgtacagcatgaagtgcaagaacgtggtgcccctctatgacctgctgctggaggcggcggacgcccaccgcctacatgcgcccactagccgtggaggggcatccgtggaggagacggaccaaagccacttggccactgcgggctctacttcatcgcattccttgcaaaagtattacatcacgggggaggcagagggtttccctgccacagcttgacacgagagcacaaagcaacattgccccaaaagccttggtgaaacttgctattacatatgaaaaaaaaaaaaaagccatgtccaaatatgtacagtaactatggaaattcagcaaagagttcctgcaagatcagaaccagccgggaggtggcactatcagccaaattcttccaggtgtgggtgacaagaaacattgtagctcctcccaggttggttctacaaaataagatgggaatgccagattactgggtagtgcttatgaacataaacatattcagaaacgttcatgaaggggtcacagacctagtgacccctaacacccatagcacaaaacaaggatgtagcttgagaaaccaacaaaagccccctgtaactcatgtgaagcagatgacaagtcaaagatcccatacccagctcccttttatcttctcagcaagcaggaggctatggaggaggaaggcaagagcatccataaactggaacatcaacctgggtggaga

SEQ ID NO: 180 - DNA, 3811 bp, synthetic construct
  source 1..3811: mol_type = other DNA
ccatcgtcatcctctactgcaggatctactccttggtcaggactcgaagccgccgcctgaccttccgcaagaacatctccaaggccagtcgcagttctgagaagtctctggccttgctgaagacggtgatcattgtcctgagtgtcttcattgcctgctgggcccctctcttcatcctactactgttagatgtgggctgcaaggcgaagacctgtgacatcctgtacaaagcagagtacttcctggttctggctgtgctgaactcaggtaccaaccccatcatctacactctgaccaacaaggagatgcgccgggccttcatccggatcgtatcttgttgcaaatgccccaacggagactctgctggcaaattcaagaggcccatcatcccaggcatggaatttagccgcagcaaatcagacaactcctctcacccccagaaggacgatggggacaacccagagaccattatgtcgtctggaaacgtcaattcttcttccgccacgaacttctctctgttaaagcaagcaggagacgtggaagaaaaccccggtcctggcagcgtgtctaagggcgaagagctgattaaggagaacatgcacatgaagctgtacatggagggcaccgtggacaaccatcacttcaagtgcacatccgagggcgaaggcaagccctacgagggcacccagaccatgagaatcaaggtggtcgagggcggccctctccccttcgccttcgacatcctggctactagcttcctctacggcagcaagaccttcatcaaccacacccagggcatccccgacttcttcaagcagtccttccctgagggcttcacatgggagagagtcaccacatacgaagacgggggcgtgctgaccgctacccaggacaccagcctccaggacggctgcctcatctacaacgtcaagatcagaggggtgaacttcacatccaacggccctgtgatgcagaagaaaacactcggctgggaggccttcaccgagacgctgtaccccgctgacggcggcctggaaggcagaaacgacatggccctgaagctcgtgggcgggagccatctgatcgcaaacgccaagaccacatatagatccaagaaacccgctaagaacctcaagatgcctggcgtctactatgtggactacagactggaaagaatcaaggaggccaacaacgagacctacgtcgagcagcacgaggtggcagtggccagatactgcgacctccctagcaaactggggcacaagcttaatgagggcaggggaagtcttctaacatgcggggacgtggaggaaaatcccggccccggcagctccaacctgctgactgtgcaccaaaacctgcctgccctccctgtggatgccacctctgatgaagtcaggaagaacctgatggacatgttcagggacaggcaggccttctctgaacacacctggaagatgctcctgtctgtgtgcagatcctgggctgcctggtgcaagctgaacaacaggaaatggttccctgctgaacctgaggatgtgagggactacctcctgtacctgcaagccagaggcctggctgtgaagaccatccaacagcacctgggccagctcaacatgctgcacaggagatctggcctgcctcgcccttctgactccaatgctgtgtccctggtgatgaggagaatcagaaaggagaatgtggatgctggggagagagccaagcaggccctggcctttgaacgcactgactttgaccaagtcagatccctgatggagaactctgacagatgccaggacatcaggaacctggccttcctgggcattgcctacaacaccctgctgcgcattgccgaaattgccagaatcagagtgaaggacatctcccgcaccgatggtgggagaatgctgatccacattggcaggaccaagaccctggtgtccacagctggtgtggagaaggccctgtccctgggggttaccaagctggtggagagatggatctctgtgtctggtgtggctgatgaccccaacaactacctgttctgccgggtcagaaagaatggtgtggctgccccttctgccacctcccaactgtccacccgggccctggaagggatctttgaggccacccaccgcctgatctatggtgccaaggatgactctgggcagagatacctggcctggtctggccactctgccagagtgggtgctgccagggacatggccagggctggtgtgtccatccctgaaatcatgcaggctggtggctggaccaatgtgaacattgtgatgaactacatcagaaacctggactctgagactggggccatggtgaggctgctcgaagatggggacctcgagccatctgctggagacatgagagctgccaacctttggccaagcccgctcatgatcaaacgctctaagaagaacagcctggccttgtccctgacggccgaccagatggtcagtgccttgttggatgctgagccccccatactctattccgagtatgatcctaccagacccttcagtgaagcttcgatgatgggcttactgaccaacctggcagacagggagctggttcacatgatcaactgggcgaagagggtgccaggctttgtggatttgaccctccatgatcaggtccaccttctagaatgtgcctggctagagatcctgatgattggtctcgtctggcgctccatggagcacccagtgaagctactgtttgctcctaacttgctcttggacaggaaccagggaaaatgtgtagagggcatggtggagatcttcgacatgctgctggctacatcatctcggttccgcatgatgaatctgcagggagaggagtttgtgtgcctcaaatctattattttgcttaattctggagtgtacacatttctgtccagcaccctgaagtctctggaagagaaggaccatatccaccgagtcctggacaagatcacagacactttgatccacctgatggccaaggcaggcctgaccctgcagcagcagcaccagcggctggcccagctcctcctcatcctctcccacatcaggcacatgagtaacaaaggcatggagcatctgtacagcatgaagtgcaagaacgtggtgcccctctatgacctgctgctggaggcggcggacgcccaccgcctacatgcgcccactagccgtggaggggcatccgtggaggagacggaccaaagccacttggccactgcgggctctacttcatcgcattccttgcaaaagtattacatcacgggggaggcagagggtttccctgccacagcttgaagcctgaagaagctgttgatactgagggaagcattctgacttgatcacccactaccccagcatttcaaaaatgtctctcgctctccactgctgcaaggaaggagcaactgggagcctgagagagggagggaagggagaatgtgcggcctggtgataccatgatgtaggtaggtagtaattgtgaacaatgcactgggaagggtggagatcaggtctggcctgcagtgggtttcctgcccccccctcccccgtaccctggagctttgattttgcactgagccaaaggtctagcattgtcaagctcccagagggctcatctggtccctcctcaaagactaaggtcccaagagaaagtgttgtgatctctcactgtaatgtcaaagtgagtatgtgccctttagcttggttgggtggtgtacatgtccccaccctccggtttcttctcaccctgtctccccttaccaccccttctttatatcgtaactgcctgacttttgttc

SEQ ID NO: 181 - DNA, 3049 bp, synthetic construct
  source 1..3049: mol_type = other DNA
ctgctcttgtaaagaacccaagttcagtccctagcatctgcactgagtggctcacaactgcctgtaactctggctccaggaaatttgccccctagaaactgtaaccaagcaacttcagtcatgcgcacgggcacacacacatgtgcgcatgcgcacacatgcgcacacgcatgatgaaaaatcaaaataaatctttaaaacgttggcttggggatactacttgactgtgaaaaatgttgctgtaatgtctcttccacatttcttttaaaacgcttcacaccttgtccacgatctccaactagaagccttccgtgctctcttcttcacgttagtggctctttacctcctctgctagcacttcagtgtttgtggtttccttgcctctgtcacctagagaatgttcacctgtattactaacaaattcgtttttaccacttttaaaagctccttagtttaattttataatctgttgcttctctttcaggatggatgatccatacggcagcgccacgaacttctctctgttaaagcaagcaggagacgtggaagaaaaccccggtcctggcagcgtgtccaacctgctgactgtgcaccaaaacctgcctgccctccctgtggatgccacctctgatgaagtcaggaagaacctgatggacatgttcagggacaggcaggccttctctgaacacacctggaagatgctcctgtctgtgtgcagatcctgggctgcctggtgcaagctgaacaacaggaaatggttccctgctgaacctgaggatgtgagggactacctcctgtacctgcaagccagaggcctggctgtgaagaccatccaacagcacctgggccagctcaacatgctgcacaggagatctggcctgcctcgcccttctgactccaatgctgtgtccctggtgatgaggagaatcagaaaggagaatgtggatgctggggagagagccaagcaggccctggcctttgaacgcactgactttgaccaagtcagatccctgatggagaactctgacagatgccaggacatcaggaacctggccttcctgggcattgcctacaacaccctgctgcgcattgccgaaattgccagaatcagagtgaaggacatctcccgcaccgatggtgggagaatgctgatccacattggcaggaccaagaccctggtgtccacagctggtgtggagaaggccctgtccctgggggttaccaagctggtggagagatggatctctgtgtctggtgtggctgatgaccccaacaactacctgttctgccgggtcagaaagaatggtgtggctgccccttctgccacctcccaactgtccacccgggccctggaagggatctttgaggccacccaccgcctgatctatggtgccaaggatgactctgggcagagatacctggcctggtctggccactctgccagagtgggtgctgccagggacatggccagggctggtgtgtccatccctgaaatcatgcaggctggtggctggaccaatgtgaacattgtgatgaactacatcagaaacctggactctgagactggggccatggtgaggctgctcgaagatggggacctcgagccatctgctggagacatgagagctgccaacctttggccaagcccgctcatgatcaaacgctctaagaagaacagcctggccttgtccctgacggccgaccagatggtcagtgccttgttggatgctgagccccccatactctattccgagtatgatcctaccagacccttcagtgaagcttcgatgatgggcttactgaccaacctggcagacagggagctggttcacatgatcaactgggcgaagagggtgccaggctttgtggatttgaccctccatgatcaggtccaccttctagaatgtgcctggctagagatcctgatgattggtctcgtctggcgctccatggagcacccagtgaagctactgtttgctcctaacttgctcttggacaggaaccagggaaaatgtgtagagggcatggtggagatcttcgacatgctgctggctacatcatctcggttccgcatgatgaatctgcagggagaggagtttgtgtgcctcaaatctattattttgcttaattctggagtgtacacatttctgtccagcaccctgaagtctctggaagagaaggaccatatccaccgagtcctggacaagatcacagacactttgatccacctgatggccaaggcaggcctgaccctgcagcagcagcaccagcggctggcccagctcctcctcatcctctcccacatcaggcacatgagtaacaaaggcatggagcatctgtacagcatgaagtgcaagaacgtggtgcccctctatgacctgctgctggaggcggcggacgcccaccgcctacatgcgcccactagccgtggaggggcatccgtggaggagacggaccaaagccacttggccactgcgggctctacttcatcgcattccttgcaaaagtattacatcacgggggaggcagagggtttccctgccacagcttgattcatcctttgtgaaaggaaagccatgaagtgctaaagacaaaacattggaaaataacgtcaagtcctcccgtgaagattttacacgcaggcatctcccacattagagatgcagtgtttgctcaacgaatctggaaggatttcttcatgaccaacagctcctcctaatttcccctcgctcattcatcccattaaccctatcccataatgtgtgtctatacagagtagtattttatcatcttttctgtggaggaacaagcaaaagtgttactgtagaatataaagacagctgcttttactctttcctaactcttgtttcctagttcaattcagcacagaagctaatgccaaacacagtgaaaatatgatccatgagtaattggaaactcagactccttgcgcatagtacgtaccctatgtaacatcgacaaaaatctttcatttccacctccaaagaacagtgctctattcaagttgggaaagtcctacttcctctgt

SEQ ID NO: 182 - DNA, 3400 bp, synthetic construct
  source 1..3400: mol_type = other DNA
ctgtctgcctgtctctctgtctgtctctgtctctctgtctgtctctgtctctctctctctctctcatacacacacacatacatacactcacacacacacacacacacctggagcctcttagttatttgtttgtattatgcattattttatacaatgattacttcaaggcacttacaacccagttttcttttctgctttacccaggacagagcttccacttagacgcttgcctcttgcctcctcttcgctcagtcttcataactctttccttttgctaacctcccctcaggtggggttccttccagggcagaattcgccccttctttttttcctggtcctcaagcaatttactttcctctggagccacccacttcgtttagacactttcctttccagagatcaaatttaaagcccttcactccgtttatatcatctctctttctccacagcccttgtacgaagtcgatgacttgcgagatgcatttcgtatgttgggatttgccacgaacttctctctgttaaagcaagcaggagacgtggaagaaaaccccggtccttctagaggaatcagcctaatcgccgcactcgcggtggactacgtaatcggcatggagaatgccatgccctggaatttgcctgccgacctggcatggttcaaaaggaacacgctgaataagcctgtcattatgggaaggcatacgtgggagtctataggcaggcctctgccaggtcgcaagaacataattctgtccagccagcctagtacagacgaccgtgttacatgggtgaaaagtgtagacgaggccattgccgcctgcggagatgttcctgaaattatggtcattggcggaggcagggtaattgagcagtttctccctaaggcccagaagctctaccttacccacatcgacgcggaggtggaaggcgacacccattttcccgattacgagcccgacgattgggaaagtgtcttctctgaattccacgacgccgatgcccaaaactcccactcctattgttttgagatccttgaaagaagaggggctcccaaaaaaaagagaaaagtctacccctacgatgtccccgattacgccggtagctcagagctcatcatctctggcagttccgggggctttctgaggaatattggaaaagagtaccaggaggcagccgaaaatttcatgaggttcatgaacgatcaaggtgcatatgcccccaacaccctgagggatctgcgtctcgtctttcactcttgggcaaggtggtgtcatgctcgtcaactggcgtggtttcctatcagccccgaaatggcgcgggaatacttcctgcagcttcacgacgctgacctggcaagcactacgattgataagcattacgcaatgctgaatatgctgctctcacattgtgggttgcctccactgagcgacgacaagtctgtctcattggctatgaggcgaatcaggcgggaagcagctaccgagaagggtgaaaggactggacaggctatccccctgagatgggacgacctgaagctgctggatgtactgctcagcagaagcgaacggctggtggatctcaggaaccgagcgtttctttttgtggcatataacaccctgatgcgtatgtctgagatctcacggattcgggttggggacctagaccagacaggcgataccgtgaccctacacatctcacacacaaaaactatcactactgcggctgggctggacaaagtgctttccagacgtacgaccgccgtgctgaacgattggcttgacgtaagtggccttcgggagcatccagacgccgtgctgtttccccccatccatagatctaacaaggctcgaattacaactactcctctgaccgcgcccgctatggagaagatcttctccgatgcttgggtcctcctgaacaagagagacgctacccctaataagggaaggtacagaacttggacgggtcattctgccagagtaggtgccgcaatcgacatggccgagaagcaggtgtccatggtggagattatgcaggaggggacctggaaaaaacctgaaacccttatgaggtacctgcgaagaggtggggtgagtgtgggcgctaacagtaggctgatggacagtggatccggcgagggcaggggaagtcttctaacatgcggggacgtggaggaaaatcccggccccggagtgtctaagggcgaagagctgattaaggagaacatgcacatgaagctgtacatggagggcaccgtggacaaccatcacttcaagtgcacatccgagggcgaaggcaagccctacgagggcacccagaccatgagaatcaaggtggtcgagggcggccctctccccttcgccttcgacatcctggctactagcttcctctacggcagcaagaccttcatcaaccacacccagggcatccccgacttcttcaagcagtccttccctgagggcttcacatgggagagagtcaccacatacgaagacgggggcgtgctgaccgctacccaggacaccagcctccaggacggctgcctcatctacaacgtcaagatcagaggggtgaacttcacatccaacggccctgtgatgcagaagaaaacactcggctgggaggccttcaccgagacgctgtaccccgctgacggcggcctggaaggcagaaacgacatggccctgaagctcgtgggcgggagccatctgatcgcaaacgccaagaccacatatagatccaagaaacccgctaagaacctcaagatgcctggcgtctactatgtggactacagactggaaagaatcaaggaggccaacaacgagacctacgtcgagcagcacgaggtggcagtggccagatactgcgacctccctagcaaactggggcacaagcttaattagaagcaacctcctggaatgtcacacgtgatgaaatttctctgaagagactggatagaaaaacaacccttcaactacatgtttttcttcttaagtactcacttttataagtgtagggggaaattatatgactttttaaaaaatacttgagctgcacaggaccgccagagcaatgatgtaactgagcttgctgtgcaacatcgccatctactggggaacagcagaacttccagactttgggtcgtgaatgatgctcttttttttcaacagcatggaaaagcatatggagacgaccacacagtttgttacacccaccctgtgttccttgattcatttgaattctcaggggtatcagtgacggattcttctattctttccctctaaggctcactttcaggggtccttttctgacaaggtcacggggctgtcctacagtctctgtctgagcaatcacaagccattctctcaaaagcattaatactcaggcacatgctgtatgtttt

SEQ ID NO: 183 - DNA, 2245 bp, synthetic construct
  source 1..2245: mol_type = other DNA
gccgctaccccgaccacatgaagcagcacgacttcttcaagtccgccatgcccgaaggctacgtccaggagcgcaccatcttcttcaaggacgacggcaactacaagacccgcgccgaggtgaagttcgagggcgacaccctggtgaaccgcatcgagctgaagggcatcgacttcaaggaggacggcaacatcctggggcacaagctggagtacaactacaacagccacaacgtctatatcatggccgacaagcagaagaacggcatcaaggtgaacttcaagatccgccacaacatcgaggacggcagcgtgcagctcgccgaccactaccagcagaacacccccatcggcgacggccccgtgctgctgcccgacaaccactacctgagcacccagtccgccctgagcaaagaccccaacgagaagcgcgatcacatggtcctgctggagttcgtgaccgccgccgggatcactctcggcatggacgagctgtacaagggatctggagcaacaaacttctcactactcaaacaagcaggtgacgtggaggagaatcccgggcctggctccggcaagctgctgccgtcggtggtgctgaagctccttctggctgcagttctttcggcactggtgactggcgagagcctggagcagcttcggagagggctagctgctggaaccagcaacccggacccttccactggatctacggaccagctgctacgcctaggaggcggccgggaccggaaagtccgtgacttgcaagaggcagatctggaccttttgagagtcactttatcctccaagccacaagcactggccacaccaagcaaggaggagcacgggaaaagaaagaagaaaggcaagggactagggaagaagagggacccatgtcttcggaaatacaaggacttctgcatccacggagaatgcaaatatgtgaaggagctccgggctccctcctgcatctgccacccaggttaccatggagagaggtgtcatgggctgagcctcccagtggaaaatcgcttatatacctatgaccatacaactatcctggctgtggtggccgtggtgctgtcctctgtctgtctgctggtcatcgtggggcttctcatgtttaggtaccataggagaggtggttatgatgtggaaaacgaagagaaagtgaagttgggcatgactaattcccacggaagcgagggcaggggaagtcttctaacatgcggggacgtggaggaaaatcccggccccatgaacccagccatcagcgtcgctctcctgctctcagtcttgcaggtgtcccgagggcagaaggtgaccagcctgacagcctgcctggtgaaccaaaaccttcgcctggactgccgccatgagaataacaccaaggataactccatccagcatgagttcagcctgacccgagagaagaggaagcacgtgctctcaggcacccttgggatacccgagcacacgtaccgctcccgcgtcaccctctccaaccagccctatatcaaggtccttaccctagccaacttcaccaccaaggatgagggcgactacttttgtgagcttcgcgtctcgggcgcgaatcccatgagctccaataaaagtatcagtgtgtatagagacaagctggtcaagtgtggcggcataagcctgctggttcagaacacatcctggatgctgctgctgctgctttccctctccctcctccaagccctggacttcatttctctgtgataaagcggccggccctgcaggaattcgatatcaagcttatcgataatcaacctctggattacaaaatttgtgaaagattgactggtattcttaactatgttgctccttttacgctatgtggatacgctgctttaatgcctttgtatcatgctattgcttcccgtatggctttcattttctcctccttgtataaatcctggttgctgtctctttatgaggagttgtggcccgttgtcaggcaacgtggcgtggtgtgcactgtgtttgctgacgcaacccccactggttggggcattgccaccacctgtcagctcctttccgggactttcgctttccccctccctattgccacggcggaactcatcgccgcctgccttgcccgctgctggacaggggctcggctgttgggcactgacaattccgtggtgttgtcggggaaatcatcgtcctttccttggctgctcgcctgtgttgccacctggattctgcgcgggacgtcc

SEQ ID NO: 184 - DNA, 4574 bp, synthetic construct
  source 1..4574: mol_type = other DNA
gtaatgaactggggcccccagagctgactaggagcctctgctgaaggtagcttgtacaaaaggaggtgttggcaacacagtacctgtcccaggcccaggctgtagaaagctgggctccctgggtgtgtcataaccacacccatgtgtctcctctgagcagacacacactttgtcagtgggcttcccctccatgctcacacctggcccactcactgtccccatgtccttaaacaacagcctagagacgagggtcccacacaccttcctagagcgtggatcacagacctggggaaagggcagaggctgcctcaggagggaggtgcagccctaaccatgtccacagtcagagctgggaaggccgggggccccaggactgtcctctgacctcccataagcataaatcatgcttctctgggaggagccttgacatgaggaggttgggaccagggtgaacaacagctcagtgccttgtatccactcaattcacagggggattctggaggcccgcttgtgtgtaaaaaagtggctgcaggcatagtttcctatggatataaggatggttcacctccacgtgctttcaccaaagtctcgagtttcttaagctggataaagaaaacaatgaaaagcagctaacccctctccctcccccccccctaacgttactggccgaagccgcttggaataaggccggtgtgcgtttgtctatatgttattttccaccatattgccgtcttttggcaatgtgagggcccggaaacctggccctgtcttcttgacgagcattcctaggggtctttcccctctcgccaaaggaatgcaaggtctgttgaatgtcgtgaaggaagcagttcctctggaagcttcttgaagacaaacaacgtctgtagcgaccctttgcaggcagcggaaccccccacctggcgacaggtgcctctgcggccaaaagccacgtgtataagatacacctgcaaaggcggcacaaccccagtgccacgttgtgagttggatagttgtggaaagagtcaaatggctctcctcaagcgtattcaacaaggggctgaaggatgcccagaaggtaccccattgtatgggatctgatctggggcctcggtacacatgctttacatgtgtttagtcgaggttaaaaaaacgtctaggccccccgaaccacggggacgtggttttcctttgaaaaacacgatgataatatggccacaaccatggtgtctaagggcgaagagctgattaaggagaacatgcacatgaagctgtacatggagggcaccgtggacaaccatcacttcaagtgcacatccgagggcgaaggcaagccctacgagggcacccagaccatgagaatcaaggtggtcgagggcggccctctccccttcgccttcgacatcctggctactagcttcctctacggcagcaagaccttcatcaaccacacccagggcatccccgacttcttcaagcagtccttccctgagggcttcacatgggagagagtcaccacatacgaagacgggggcgtgctgaccgctacccaggacaccagcctccaggacggctgcctcatctacaacgtcaagatcagaggggtgaacttcacatccaacggccctgtgatgcagaagaaaacactcggctgggaggccttcaccgagacgctgtaccccgctgacggcggcctggaaggcagaaacgacatggccctgaagctcgtgggcgggagccatctgatcgcaaacgccaagaccacatatagatccaagaaacccgctaagaacctcaagatgcctggcgtctactatgtggactacagactggaaagaatcaaggaggccaacaacgagacctacgtcgagcagcacgaggtggcagtggccagatactgcgacctccctagcaaactggggcacaagcttaatgccacgaacttctctctgttaaagcaagcaggagacgtggaagaaaaccccggtcctggcagctccaacctgctgactgtgcaccaaaacctgcctgccctccctgtggatgccacctctgatgaagtcaggaagaacctgatggacatgttcagggacaggcaggccttctctgaacacacctggaagatgctcctgtctgtgtgcagatcctgggctgcctggtgcaagctgaacaacaggaaatggttccctgctgaacctgaggatgtgagggactacctcctgtacctgcaagccagaggcctggctgtgaagaccatccaacagcacctgggccagctcaacatgctgcacaggagatctggcctgcctcgcccttctgactccaatgctgtgtccctggtgatgaggagaatcagaaaggagaatgtggatgctggggagagagccaagcaggccctggcctttgaacgcactgactttgaccaagtcagatccctgatggagaactctgacagatgccaggacatcaggaacctggccttcctgggcattgcctacaacaccctgctgcgcattgccgaaattgccagaatcagagtgaaggacatctcccgcaccgatggtgggagaatgctgatccacattggcaggaccaagaccctggtgtccacagctggtgtggagaaggccctgtccctgggggttaccaagctggtggagagatggatctctgtgtctggtgtggctgatgaccccaacaactacctgttctgccgggtcagaaagaatggtgtggctgccccttctgccacctcccaactgtccacccgggccctggaagggatctttgaggccacccaccgcctgatctatggtgccaaggatgactctgggcagagatacctggcctggtctggccactctgccagagtgggtgctgccagggacatggccagggctggtgtgtccatccctgaaatcatgcaggctggtggctggaccaatgtgaacattgtgatgaactacatcagaaacctggactctgagactggggccatggtgaggctgctcgaagatggggacctcgagccatctgctggagacatgagagctgccaacctttggccaagcccgctcatgatcaaacgctctaagaagaacagcctggccttgtccctgacggccgaccagatggtcagtgccttgttggatgctgagccccccatactctattccgagtatgatcctaccagacccttcagtgaagcttcgatgatgggcttactgaccaacctggcagacagggagctggttcacatgatcaactgggcgaagagggtgccaggctttgtggatttgaccctccatgatcaggtccaccttctagaatgtgcctggctagagatcctgatgattggtctcgtctggcgctccatggagcacccagtgaagctactgtttgctcctaacttgctcttggacaggaaccagggaaaatgtgtagagggcatggtggagatcttcgacatgctgctggctacatcatctcggttccgcatgatgaatctgcagggagaggagtttgtgtgcctcaaatctattattttgcttaattctggagtgtacacatttctgtccagcaccctgaagtctctggaagagaaggaccatatccaccgagtcctggacaagatcacagacactttgatccacctgatggccaaggcaggcctgaccctgcagcagcagcaccagcggctggcccagctcctcctcatcctctcccacatcaggcacatgagtaacaaaggcatggagcatctgtacagcatgaagtgcaagaacgtggtgcccctctatgacctgctgctggaggcggcggacgcccaccgcctacatgcgcccactagccgtggaggggcatccgtggaggagacggaccaaagccacttggccactgcgggctctacttcatcgcattccttgcaaaagtattacatcacgggggaggcagagggtttccctgccacagcttgactacagaagcaacatggatcctgctctgattacccatcgtccctagagctgagtccaggattgctctaggacaggtggcaggatctgaataaaggactgcaaagactggcttcatgtccattcacaaggaccagctctgtccttggcaggccaatggaacacctcttctgccaccatgctgtgacaacccaactgacatcttcctatggaagtttgccctctccacaaaagaagtagaatgtttgcattggagctgggcatgctctgcttcccctcagtgccccgagaatgttatctaatgctagtcatcattaatagctccctacagaactttcatacagttgcacccaagttgctgatgtgttctctagaatagagcaagaaatagtaaacagaattccttttgcctctctgtactattttcccccaaataccaagatttgtatgttttataaagctaatttccttatcaaatgacatcttttaatttttacattaatggcttattttcaaggtacaacctgatttttttatggacaaaaatgatgtaaaatcaaataaaactaattaatatatccattaatttaaatactttttatt

SEQ ID NO: 185 - DNA, 4083 bp, synthetic construct
  source 1..4083: mol_type = other DNA
gtgggcttttcataagaatgggttttgccacgtggaacatttggggctatggtgctaaataggctgatgggtgcttggtgggcctgtctgttactgccttgtccatcactcttccattgttcttcccagactgtacgttgctaatggatgctcctgattaccctcactagatggtcatgcttggtcctggtacaagagatgagcccaaatgcacatctgtcctgatggactcagcatccaaaacactgatgctccaccactgggagcttgggtttctgggactctgataccataggctacaaaccccaccctatgcccttgtggtcttgccctgggctgtaagtggtggttctctgagtcattcgctgtgggttctgctgtggttacttcatgattctcacacaagtactcagaagacgtcatcaggcaggggcagtagggcaggagttttcatagaaagcatgtgatgaagcatcataaaagcagagagggggtacaaggtcacagagccccctctgccttcttcctctcctagaggttaaaagagagcaaggacaacactcttgacgctgggacctaggcggccttccggggaagatggtgtctaagggcgaagagctgattaaggagaacatgcacatgaagctgtacatggagggcaccgtggacaaccatcacttcaagtgcacatccgagggcgaaggcaagccctacgagggcacccagaccatgagaatcaaggtggtcgagggcggccctctccccttcgccttcgacatcctggctactagcttcctctacggcagcaagaccttcatcaaccacacccagggcatccccgacttcttcaagcagtccttccctgagggcttcacatgggagagagtcaccacatacgaagacgggggcgtgctgaccgctacccaggacaccagcctccaggacggctgcctcatctacaacgtcaagatcagaggggtgaacttcacatccaacggccctgtgatgcagaagaaaacactcggctgggaggccttcaccgagacgctgtaccccgctgacggcggcctggaaggcagaaacgacatggccctgaagctcgtgggcgggagccatctgatcgcaaacgccaagaccacatatagatccaagaaacccgctaagaacctcaagatgcctggcgtctactatgtggactacagactggaaagaatcaaggaggccaacaacgagacctacgtcgagcagcacgaggtggcagtggccagatactgcgacctccctagcaaactggggcacaagcttaatgccacgaacttctctctgttaaagcaagcaggagacgtggaagaaaaccccggtcctggcagctccaacctgctgactgtgcaccaaaacctgcctgccctccctgtggatgccacctctgatgaagtcaggaagaacctgatggacatgttcagggacaggcaggccttctctgaacacacctggaagatgctcctgtctgtgtgcagatcctgggctgcctggtgcaagctgaacaacaggaaatggttccctgctgaacctgaggatgtgagggactacctcctgtacctgcaagccagaggcctggctgtgaagaccatccaacagcacctgggccagctcaacatgctgcacaggagatctggcctgcctcgcccttctgactccaatgctgtgtccctggtgatgaggagaatcagaaaggagaatgtggatgctggggagagagccaagcaggccctggcctttgaacgcactgactttgaccaagtcagatccctgatggagaactctgacagatgccaggacatcaggaacctggccttcctgggcattgcctacaacaccctgctgcgcattgccgaaattgccagaatcagagtgaaggacatctcccgcaccgatggtgggagaatgctgatccacattggcaggaccaagaccctggtgtccacagctggtgtggagaaggccctgtccctgggggttaccaagctggtggagagatggatctctgtgtctggtgtggctgatgaccccaacaactacctgttctgccgggtcagaaagaatggtgtggctgccccttctgccacctcccaactgtccacccgggccctggaagggatctttgaggccacccaccgcctgatctatggtgccaaggatgactctgggcagagatacctggcctggtctggccactctgccagagtgggtgctgccagggacatggccagggctggtgtgtccatccctgaaatcatgcaggctggtggctggaccaatgtgaacattgtgatgaactacatcagaaacctggactctgagactggggccatggtgaggctgctcgaagatggggacctcgagccatctgctggagacatgagagctgccaacctttggccaagcccgctcatgatcaaacgctctaagaagaacagcctggccttgtccctgacggccgaccagatggtcagtgccttgttggatgctgagccccccatactctattccgagtatgatcctaccagacccttcagtgaagcttcgatgatgggcttactgaccaacctggcagacagggagctggttcacatgatcaactgggcgaagagggtgccaggctttgtggatttgaccctccatgatcaggtccaccttctagaatgtgcctggctagagatcctgatgattggtctcgtctggcgctccatggagcacccagtgaagctactgtttgctcctaacttgctcttggacaggaaccagggaaaatgtgtagagggcatggtggagatcttcgacatgctgctggctacatcatctcggttccgcatgatgaatctgcagggagaggagtttgtgtgcctcaaatctattattttgcttaattctggagtgtacacatttctgtccagcaccctgaagtctctggaagagaaggaccatatccaccgagtcctggacaagatcacagacactttgatccacctgatggccaaggcaggcctgaccctgcagcagcagcaccagcggctggcccagctcctcctcatcctctcccacatcaggcacatgagtaacaaaggcatggagcatctgtacagcatgaagtgcaagaacgtggtgcccctctatgacctgctgctggaggcggcggacgcccaccgcctacatgcgcccactagccgtggaggggcatccgtggaggagacggaccaaagccacttggccactgcgggctctacttcatcgcattccttgcaaaagtattacatcacgggggaggcagagggtttccctgccacagcttgatagaacttgtttattgcagcttataatggttacaaataaagcaatagcatcacaaatttcacaaataaagcatttttttcactgcattctagttgtggtttgtccaaactcatcaatgtatcttaaagaagttcctgctactgctgaccttgtctctggcctccaggacaaaggcaggtgagtaagcaacaccttcctttagtggtctaaccccgctgtcaccagtagcaggagggcagaggtctttctcaggaagggccactgaatgctctccgctccctgagccattcccttatcatctgcaaagtggatcttcctagaagtacatgatcaagggtaggaacctgcaaatcagaaaacaatatgttctcctggagcagatagaatgggcctggtttctgcaactatgatgatacaggctttcccctcaccccaaactcagtcatcaaagaagcctaggtgtttatgacccccgagtagatggaattgctgtcctcagaacaagtgattttgcttgtccctagctacttggtctcttcctctaactcagtgcttcacagggctctagtggttccccagtgttcaaggatgagccactgggcactctgctttctggaaggccagcacctacatctaggaatgaaagccagtggggaggcctgaagaaataagatgctgtgaagtgtgaactttggcccctagaaagcagcagtattccaggcatcacagggc

SEQ ID NO: 186 - DNA, 1327 bp, synthetic construct
  source 1..1327: mol_type = other DNA
gcgcggcaccaacttcccccccgacggccccgtaatgcagaagaagaccatgggctgggaggcctccaccgagcgcctgtacccccgcgacggcgtgctgaagggcgagatccaccaggccctgaagctgaaggacggcggccactacctggtggagttcaagaccatctacatggccaagaagcccgtgcaactgcccggctactactacgtggacaccaagctggacatcacctcccacaacgaggactacaccatcgtggaacagtacgagcgctccgagggccgccaccacctgtttctctacggcatggacgagctgtacaagggatctggagcaacaaacttctcactactcaaacaagcaggtgacgtggaggagaatcccgggcctggctccggcaagctgctgccgtcggtggtgctgaagctccttctggctgcagttctttcggcactggtgactggcgagagcctggagcagcttcggagagggctagctgctggaaccagcaacccggacccttccactggatctacggaccagctgctacgcctaggaggcggccgggaccggaaagtccgtgacttgcaagaggcagatctggaccttttgagagtcactttatcctccaagccacaagcactggccacaccaagcaaggaggagcacgggaaaagaaagaagaaaggcaagggactagggaagaagagggacccatgtcttcggaaatacaaggacttctgcatccacggagaatgcaaatatgtgaaggagctccgggctccctcctgcatctgccacccaggttaccatggagagaggtgtcatgggctgagcctcccagtggaaaatcgcttatatacctatgaccatacaactatcctggctgtggtggccgtggtgctgtcctctgtctgtctgctggtcatcgtggggcttctcatgtttaggtaccataggagaggtggttatgatgtggaaaacgaagagaaagtgaagttgggcatgactaattcccactaggaattgtgttgcacttaacgcgtacaaggccggccctgcaggaattcgatatcaagcttatcgataatcaacctctggattacaaaatttgtgaaagattgactggtattcttaactatgttgctccttttacgctatgtggatacgctgctttaatgcctttgtatcatgctattgcttcccgtatggctttcattttctcctccttgtataaatcctggttgctgtctctttatgaggagttgtggcccgttgtcaggcaacgtggcgtggtgtgcactgtgtttgctgacgcaaccc

SEQ ID NO: 187 - DNA, 1183 bp, synthetic construct
  source 1..1183: mol_type = other DNA
gcgcggcaccaacttcccccccgacggccccgtaatgcagaagaagaccatgggctgggaggcctccaccgagcgcctgtacccccgcgacggcgtgctgaagggcgagatccaccaggccctgaagctgaaggacggcggccactacctggtggagttcaagaccatctacatggccaagaagcccgtgcaactgcccggctactactacgtggacaccaagctggacatcacctcccacaacgaggactacaccatcgtggaacagtacgagcgctccgagggccgccaccacctgtttctctacggcatggacgagctgtacaagggatctggagcaacaaacttctcactactcaaacaagcaggtgacgtggaggagaatcccgggcctatgaacccagccatcagcgtcgctctcctgctctcagtcttgcaggtgtcccgagggcagaaggtgaccagcctgacagcctgcctggtgaaccaaaaccttcgcctggactgccgccatgagaataacaccaaggataactccatccagcatgagttcagcctgacccgagagaagaggaagcacgtgctctcaggcacccttgggatacccgagcacacgtaccgctcccgcgtcaccctctccaaccagccctatatcaaggtccttaccctagccaacttcaccaccaaggatgagggcgactacttttgtgagcttcgcgtctcgggcgcgaatcccatgagctccaataaaagtatcagtgtgtatagagacaagctggtcaagtgtggcggcataagcctgctggttcagaacacatcctggatgctgctgctgctgctttccctctccctcctccaagccctggacttcatttctctgtgagaattgtgttgcacttaacgcgtacaaggccggccctgcaggaattcgatatcaagcttatcgataatcaacctctggattacaaaatttgtgaaagattgactggtattcttaactatgttgctccttttacgctatgtggatacgctgctttaatgcctttgtatcatgctattgcttcccgtatggctttcattttctcctccttgtataaatcctggttgctgtctctttatgaggagttgtggcccgttgtcaggcaacgtggcgtggtgtgcactgtgtttgctgacgcaaccc

SEQ ID NO: 188 - DNA, 3440 bp, synthetic construct
  source 1..3440: mol_type = other DNA
gtggtagctgaacttcatttatacagagctcctttaacctgtctgtcttcttcttggtatctaagctgccttttgtttttgtttttgtttttgtttttatgatattaacttcttttcacattcaagtttctttaaagttgactatagtgccttctgaactcttgcagagagtttggattttggaagctgccaggtacccatcacagcaggggtgccagtgacaaggatggtgtacaaatgaaacactgaagctatccaaataaattcctctaagtgtaattcattttactgcagcacaggaagaacaaatttgtcttacaactttaataattagtaccattatgaaccctaggagagaaataagagcaaatacctgttgaataaatgaatgtaagaaaatgtgtgtctgagcaagaatactctgtctggctactatgggaagctagctagatctgaaagacattctcagactatcctcatgttcaaggcattaaaggaataagcctccagcccctaaccttaggagaattctgcagtcaagtgaggagtttttaaaacaggaatctctaggttccagtcctctagctattcttttatgcttagtccaggtaatgagttgaacatccaagtattttttaaggacccaaagaaatgcaaccagagctattaccagaattttggagtggtcctcctagagttgccgcatgttgctgggaaaattggggtcttagagttcttagtctacttaataaaagaattttaaaaaatggactcaaaaggaagcatgaagacaatttcatataacttcgtataatgtatgctatacgaagttatggatccatgtggggaatcttaggcccttcaaattgactttctgagttcaaagctggggatctcttgggatatcaatggatttagatcacgatttcatacttttcaaagcaaggtgtaatctcgtgaattgtgaaagattagcaaagctctctgtgctctatagccccagtttccccatctgtagaataggaggcttaggcaggataaagtctgagtcttgtgcgctcagcctgctttagtggtgttatagccgagcaggtccagtgatcttgctttttctgtttttttaacctgccttcttttcgtttcacaggccagacaacactgaagatagtgacagcgtcctcaatgacatgtcacacgggagggatgatgaagacgggatcttcactctcgcagaagctgctgctaaagaagctgctgctaaagaagctgctgctaaagaagctgctgctaaagcaggagtgcaggtggaaaccatctccccaggagacgggcgcaccttccccaagcgcggccagacctgcgtggtgcactacaccgggatgcttgaagatggaaagaaagttgattcctcccgggacagaaacaagccctttaagtttatgctaggcaagcaggaggtgatccgaggctgggaagaaggggttgcccagatgagtgtgggtcagagagccaaactgactatatctccagattatgcctatggtgccactgggcacccaggcatcatcccaccacatgccactctcgtcttcgatgtggagcttctaaaactggaaggcggctacccctacgacgtgcccgactacgccggctatccgtatgatgtcccggactatgcaggctgactcaccatctttatttaggattaaggatagggaatggcacttgaattgtcaaaataagtttggggacattgtaatttccgtttaaagtctcactctgtttactgatgctgtgggtcctgtctggttgtatcttcccacatgaaggtgctttagagacacattttccctgcctcgtgccttagtcctctttgttgttttgtggctaggtgacttttcacactgggcttgaacactgtcagtgatggtgaaatccttgccacagctttgggagtctcttgcagtctcccagcagtagagggagttagaaatatccagaggggaaaaaaaaatctctcttttcagacagtatctgctttattggtggtagctgaacttcatttatacagagctcctttaacctgtctgtcttcttcttggtatctaagctgccttttgtttttgtttttgtttttgtttttatgatattaacttcttttcacattcaagtttctttaaagttgactatagtgccttctgaactcttgcagagagtttggattttggaagctgccaggtacccatcacagcaggggtgccagtgacaaggatggtgtacaaatgaaacactgaagctatccaaataaattcctctaagtgtaattcattttactgcagcacaggaagaacaaatttgtcttacaactttaataattagtaccattatgaaccctaggagagaaataagagcaaatacctgttgaataaatgaatgtaagaaaatgtgtgtctgagcaagaatactctgtctggctactatgggaagctagctagatctgaaagacattctcagactatcctcatgttcaaggcattaaaggaataagcctccagcccctaaccttaggagaattctgcagtcaagtgaggagtttttaaaacaggaatctctaggttccagtcctctagctattcttttatgcttagtccaggtaatgagttgaacatccaagtattttttaaggacccaaagaaatgcaaccagagctattaccagaattttggagtggtcctcctagagttgccgcatgttgctgggaaaattggggtcttagagttcttagtctacttaataaaagaattttaaaaaatggtggaggtttttttttttataagaaaaatgtactggacctggtgacacatgtcttcaatccctgtcatgagcaggcaaaagcaggtgggtctctgtgagttggaggctggcctggtctatatagcacatttgaggacagccagaactatatagtgagaatttgtctcaaaactaacaaaacgaacaaacaagcaaacaactctcaaactctggagcaggacagttctaaatctccactgctgactgtaggaaggagattgtgaggataaagcgacaaagcaaagacgtgaactttgagttaggcctgaatgcaagctagccaagtgatgggcaaacagccacttggggaaatgcactttaaagagagagaagctgtttccctaactgagcagccttgtctggcctcagtggaagagaatgcatgtagtccctacagtgacttgtgcaggggtggactgatacccagggagggcctcccctttctcagaggagataggaagagtagaagggggaggggctgtgtgtgtgtgtgtgtgtgtgtgtgtgtgtgtgtggtggggaaccaggaggacagaaggatgggctgtgatccacgatgtaaagtgaataaataaagaaattaatga

SEQ ID NO: 189 - DNA, 3751 bp, synthetic construct
  source 1..3751: mol_type = other DNA
tttcccctccagctgcaaacaattaatctggtcttccctgtgccctttctctgtcttcccttgccctcacactttaggtctgccacaagagatttagcagcacaagcaatctcaagacccaccttcgattgcattctggagaaaaaccttaccaatgtaaggtgtgccctgccaagtttacgcaatttgtgcacctgaagctgcacaagcgactgcatacccgggagcggcctcacaagtgtgcccagtgtcacaagagctacatccatctctgcagcctcaaggtccacctgaagggcaactgccctgcgggcccagctgctgggctgcctttggaggatctgacccgaatcaatgaagaaattgagaggttcgacatcagcgacaatgcagaccgtcttgaggacatggaggacagtgtcgatgtgacctccatggtggagaaggagattctagctgtggtcagaaaagagaaagaagaaaccagtctgaaagtgtctttgcaaagaaacatggggaacggcctcctctcctcagggtgcagcctctatgagtcatcggacctgtccctcatgaagttgcctcacagcaacccactacctctggtgcctgtaaaggtcaaacaagaaacagttgaaccgatggatcctggcggtagtgccacgaacttctctctgttaaagcaagcaggagacgtggaagaaaaccccggtccttctatggccctgcctgtgaccgccctgctgctgcctctggccctgctgctgcacgccgccagacctagcagactggaggaggagctgagaagaagactgaccgagcctatggccgacgtgcagctggtggagagcggcggcggcctggtgcaggccggcggcagcctgagactgagctgcgccgccagcggcagaaccatcagcatggccgccatgagctggttcagacaggcccctggcaaggagagagagttcgtggccggcatcagcagaagcgccggcagcgccgtgcacgccgacagcgtgaagggcagattcaccatcagcagagacaacaccaagaacaccctgtacctgcagatgaacagcctgaaggccgaggacaccgccgtgtactactgcgccgtgagaaccagcggcttcttcggcagcatccctagaaccggcaccgccttcgactactggggccagggcacccaggtgaccgtgagcatcctggactacagcttcaccggcggcgccggcagagacatccctcctcctcagatcgaggaggcctgcgagctgcctgagtgccaggtggacgccggcaacaaggtgtgcaacctgcagtgcaacaaccacgcctgcggctgggacggcggcgactgcagcctgaacttcaacgacccttggaagaactgcacccagagcctgcagtgctggaagtacttcagcgacggccactgcgacagccagtgcaacagcgccggctgcctgttcgacggcttcgactgccagctgaccgagggccagtgcaaccctctgtacgaccagtactgcaaggaccacttcagcgacggccactgcgaccagggctgcaacagcgccgagtgcgagtgggacggcctggactgcgccgagcacgtgcctgagagactggccgccggcaccctggtgctggtggtgctgctgcctcctgaccagctgagaaacaacagcttccacttcctgagagagctgagccacgtgctgcacaccaacgtggtgttcaagagagacgcccagggccagcagatgatcttcccttactacggccacgaggaggagctgagaaagcaccctatcaagagaagcaccgtgggctgggccaccagcagcctgctgcctggcaccagcggcggcagacagagaagagagctggaccctatggacatcagaggcagcatcgtgtacctggagatcgacaacagacagtgcgtgcagagcagcagccagtgcttccagagcgccaccgacgtggccgccttcctgggcgccctggccagcctgggcagcctgaacatcccttacaagatcgaggccgtgaagagcgagcctgtggagcctcctctgcctagccagctgcacctgatgtacgtggccgccgccgccttcgtgctgctgttcttcgtgggctgcggcgtgctgctgagcagaaagagaagaagacagctgtgcatccagaagctgatgagcagactggacaagagcaaggtgatcaacggcgccctggagctgctgaacggcgtgggcatcgagggcctgaccaccagaaagctggcccagaagctgggcgtggagcagcctaccctgtactggcacgtgaagaacaagagagccctgctgcacgccctgcctatcgagatgctggacagacaccacacccacttctgccctctggagggcgagagctggcaggacttcctgagaaacaacgccaagagctacagatgcgccctgctgagccacagagacggcgccaaggtgcacctgggcaccagacctaccgagaagcagtacgagaccctggagaaccagctggccttcctgtgccagcagggcttcagcctggagaacgccctgtacgccctgagcgccgtgggccacttcaccctgggctgcgtgctggaggagcaggagcaccaggtggccaaggaggagagagagacccctaccaccgacagcatgcctcctctgctgagacaggccatcgagctgttcgacagacagggcgccgagcctgccttcctgttcggcctggagctgatcatctgcggcctggagaagcagctgaagtgcgagagcggcggccctaccgacgccctggacgacttcgacctggacatgctgcctgccgacgccctggacgacttcgacctggacatgctgcctgccgacgccctggacgacttcgacctggacatgctgcctggctaagattttcagaaaataagtgtttcgtgttgcttcttagggtatggcttggtgaatcagggtgcctttagcaaattgcttgtacatgactccagatctgcaaagctccgctggcaccgggtgcttccctgcacctctctggaattaaagaaggactccaatgttaccaaaatctcagggcataaatgaggcaaagactcactatatatacatatatacatatatacatattataaatatatatatacttatttacagccatgtctatatatttgaacctgtgtattttgaatatttgtgtggatatgtttgcatagcgccttcctattactaaaactattgcctagccataattattttttcaatgataattcttcataatttattatacagtttatctttcaaaaagcaataattaaagaagtttacaatgactggaaagattctttgtaatttgagtataaatgttgtatctttgtcctgtggccattctttgtagataatttctgcacatctgtttaaatgcctgagacttagaagatagctctgtgatttcaggcaacctttctctatgataatgctttaaaatgaggttttgatattgccaaagtcatgtggttggtgtgttaactcagaagatcacacaatctgagtgacattctctaagttggggatacatgtgcagaattgctcagcaataatttgaggggaaggaagaagaaaaatattttatgtttcagaatgatggtttggttttcctcctcctagtcacaattttaccaaacagtgacaggaaggct

SEQ ID NO: 190 - DNA, 3739 bp, synthetic construct
  source 1..3739: mol_type = other DNA
tttcccctccagctgcaaacaattaatctggtcttccctgtgccctttctctgtcttcccttgccctcacactttaggtctgccacaagagatttagcagcacaagcaatctcaagacccaccttcgattgcattctggagaaaaaccttaccaatgtaaggtgtgccctgccaagtttacgcaatttgtgcacctgaagctgcacaagcgactgcatacccgggagcggcctcacaagtgtgcccagtgtcacaagagctacatccatctctgcagcctcaaggtccacctgaagggcaactgccctgcgggcccagctgctgggctgcctttggaggatctgacccgaatcaatgaagaaattgagaggttcgacatcagcgacaatgcagaccgtcttgaggacatggaggacagtgtcgatgtgacctccatggtggagaaggagattctagctgtggtcagaaaagagaaagaagaaaccagtctgaaagtgtctttgcaaagaaacatggggaacggcctcctctcctcagggtgcagcctctatgagtcatcggacctgtccctcatgaagttgcctcacagcaacccactacctctggtgcctgtaaaggtcaaacaagaaacagttgaaccgatggatcctggcggtagtgccacgaacttctctctgttaaagcaagcaggagacgtggaagaaaaccccggtccttctatggccctgcctgtgaccgccctgctgctgcctctggccctgctgctgcacgccgccagacctagcagactggaggaggagctgagaagaagactgaccgagcctggcagcgcccaggtgcagctggtggagagcggcggcggcctggtgcaggccggcggcagcctgagactgagctgcgccgtgagcggcagacctttcagcgagtacaacctgggctggttcagacaggcccctggcaaggagagagagttcgtggccagaatcagaagcagcggcaccaccgtgtacaccgacagcgtgaagggcagattcagcgccagcagagacaacgccaagaacatgggctacctgcagctgaacagcctggagcctgaggacaccgccgtgtactactgcgccatgagcagagtggacaccgacagccctgccttctacgactactggggccagggcacccaggtgaccgtgagcagcatcctggactacagcttcaccggcggcgccggcagagacatccctcctcctcagatcgaggaggcctgcgagctgcctgagtgccaggtggacgccggcaacaaggtgtgcaacctgcagtgcaacaaccacgcctgcggctgggacggcggcgactgcagcctgaacttcaacgacccttggaagaactgcacccagagcctgcagtgctggaagtacttcagcgacggccactgcgacagccagtgcaacagcgccggctgcctgttcgacggcttcgactgccagctgaccgagggccagtgcaaccctctgtacgaccagtactgcaaggaccacttcagcgacggccactgcgaccagggctgcaacagcgccgagtgcgagtgggacggcctggactgcgccgagcacgtgcctgagagactggccgccggcaccctggtgctggtggtgctgctgcctcctgaccagctgagaaacaacagcttccacttcctgagagagctgagccacgtgctgcacaccaacgtggtgttcaagagagacgcccagggccagcagatgatcttcccttactacggccacgaggaggagctgagaaagcaccctatcaagagaagcaccgtgggctgggccaccagcagcctgctgcctggcaccagcggcggcagacagagaagagagctggaccctatggacatcagaggcagcatcgtgtacctggagatcgacaacagacagtgcgtgcagagcagcagccagtgcttccagagcgccaccgacgtggccgccttcctgggcgccctggccagcctgggcagcctgaacatcccttacaagatcgaggccgtgaagagcgagcctgtggagcctcctctgcctagccagctgcacctgatgtacgtggccgccgccgccttcgtgctgctgttcttcgtgggctgcggcgtgctgctgagcagaaagagaagaagacagctgtgcatccagaagctgatgagcagactggacaagagcaaggtgatcaacggcgccctggagctgctgaacggcgtgggcatcgagggcctgaccaccagaaagctggcccagaagctgggcgtggagcagcctaccctgtactggcacgtgaagaacaagagagccctgctgcacgccctgcctatcgagatgctggacagacaccacacccacttctgccctctggagggcgagagctggcaggacttcctgagaaacaacgccaagagctacagatgcgccctgctgagccacagagacggcgccaaggtgcacctgggcaccagacctaccgagaagcagtacgagaccctggagaaccagctggccttcctgtgccagcagggcttcagcctggagaacgccctgtacgccctgagcgccgtgggccacttcaccctgggctgcgtgctggaggagcaggagcaccaggtggccaaggaggagagagagacccctaccaccgacagcatgcctcctctgctgagacaggccatcgagctgttcgacagacagggcgccgagcctgccttcctgttcggcctggagctgatcatctgcggcctggagaagcagctgaagtgcgagagcggcggccctaccgacgccctggacgacttcgacctggacatgctgcctgccgacgccctggacgacttcgacctggacatgctgcctgccgacgccctggacgacttcgacctggacatgctgcctggctaagattttcagaaaataagtgtttcgtgttgcttcttagggtatggcttggtgaatcagggtgcctttagcaaattgcttgtacatgactccagatctgcaaagctccgctggcaccgggtgcttccctgcacctctctggaattaaagaaggactccaatgttaccaaaatctcagggcataaatgaggcaaagactcactatatatacatatatacatatatacatattataaatatatatatacttatttacagccatgtctatatatttgaacctgtgtattttgaatatttgtgtggatatgtttgcatagcgccttcctattactaaaactattgcctagccataattattttttcaatgataattcttcataatttattatacagtttatctttcaaaaagcaataattaaagaagtttacaatgactggaaagattctttgtaatttgagtataaatgttgtatctttgtcctgtggccattctttgtagataatttctgcacatctgtttaaatgcctgagacttagaagatagctctgtgatttcaggcaacctttctctatgataatgctttaaaatgaggttttgatattgccaaagtcatgtggttggtgtgttaactcagaagatcacacaatctgagtgacattctctaagttggggatacatgtgcagaattgctcagcaataatttgaggggaaggaagaagaaaaatattttatgtttcagaatgatggtttggttttcctcctcctagtcacaattttaccaaacagtgacaggaaggct

SEQ ID NO: 191 - DNA, 3253 bp, synthetic construct
  source 1..3253: mol_type = other DNA
ccaccagctactcgccacgggcggcagaaaagggagccccgagctcagcgcagcccaaggtccgcggggagcccgcggcgctggaaccccaggacacgacgcggcgcgtccgggaaggcgcggggagggggtggtggacaaggaggcggcggccggggacccgggccacccggcgcccaaggagcgacgtggcctcgggaggcttaatcctctcctgcgggctcgccgagcgggcagtggcgcgcggaggcgccggggctgaaatatgataatcagaacagctgcgccgcgcgccccgcagccaatgggcgcggcgctcgcctgacgtccccgcgcgctgcgtcagaccaatggcgatggagctgagttggagctgagaagtttgagtaagagataaggaagagaggtgccccgagccgtgcgagtccgccgctgctgctgcgcctccgctctgccaactccgccggcttaaatcggactcccagatctgcgagggcgcggcgcagccgggcagctgtttcccccagttttggcaaccccgggggccactatttgccacctagccacagcaccagcatcctctctgtgggctattcaccaattgtccaaccaccatttcactgtggacattactccctcttacagatatggaacagaagctgatctcagaggaggacctgggcagcagcctggacgacgagcacatcctgagcgccctgctgcagagcgacgacgagctggtcggcgaggacagcgacagcgaggtgagcgaccacgtgagcgaggacgacgtgcagtccgacaccgaggaggccttcatcgacgaggtgcacgaggtgcagcctaccagcagcggctccgagatcctggacgagcagaacgtgatcgagcagcccggcagctccctggccagcaacaggatcctgaccctgccccagaggaccatcaggggcaagaacaagcactgctggtccacctccaagcccaccaggcggagcagggtgtccgccctgaacatcgtgagaagccagaggggccccaccaggatgtgcaggaacatctacgaccccctgctgtgcttcaagctgttcttcaccgacgagatcatcagcgagatcgtgaagtggaccaacgccgagatcagcctgaagaggcgggagagcatgacctccgccaccttcagggacaccaacgaggacgagatctacgccttcttcggcatcctggtgatgaccgccgtgaggaaggacaaccacatgagcaccgacgacctgttcgacagatccctgagcatggtgtacgtgagcgtgatgagcagggacagattcgacttcctgatcagatgcctgaggatggacgacaagagcatcaggcccaccctgcgggagaacgacgtgttcacccccgtgagaaagatctgggacctgttcatccaccagtgcatccagaactacacccctggcgcccacctgaccatcgacgagcagctgctgggcttcaggggcaggtgccccttcagggtctatatccccaacaagcccagcaagtacggcatcaagatcctgatgatgtgcgacagcggcaccaagtacatgatcaacggcatgccctacctgggcaggggcacccagaccaacggcgtgcccctgggcgagtactacgtgaaggagctgtccaagcccgtccacggcagctgcagaaacatcacctgcgacaactggttcaccagcatccccctggccaagaacctgctgcaggagccctacaagctgaccatcgtgggcaccgtgagaagcaacaagagagagatccccgaggtcctgaagaacagcaggtccaggcccgtgggcaccagcatgttctgcttcgacggccccctgaccctggtgtcctacaagcccaagcccgccaagatggtgtacctgctgtccagctgcgacgaggacgccagcatcaacgagagcaccggcaagccccagatggtgatgtactacaaccagaccaagggcggcgtggacaccctggaccagatgtgcagcgtgatgacctgcagcagaaagaccaacaggtggcccatggccctgctgtacggcatgatcaacatcgcctgcatcaacagcttcatcatctacagccacaacgtgagcagcaagggcgagaaggtgcagagccggaaaaagttcatgcggaacctgtacatgggcctgacctccagcttcatgaggaagaggctggaggcccccaccctgaagagatacctgagggacaacatcagcaacatcctgcccaaagaggtgcccggcaccagcgacgacagcaccgaggagcccgtgatgaagaagaggacctactgcacctactgtcccagcaagatcagaagaaaggccagcgccagctgcaagaagtgtaagaaggtcatctgccgggagcacaacatcgacatgtgccagagctgtttcgcggccgccaaactgggtggaggtgctccagcagtaggaggtggacctaaagcagctgacaaaggtgccgcagcggccgccaaactgggtggaggtgctccagcagtaggaggtggacctaaagcagctgacaaaggtgccgcaggagacatgggcgatccaccaaaaagtaagaagcggtttaaccttgtggggcttggtgtgctgttgtggtgtgggggggtctctctcaggcaccgatgacagggctctttggatttgtagtcactgcctggagagacagaagagaaggtggtccttttgttgttgttgttgctgctgctgttgtgtgtgtgtgtgtgtgtgtgtgtgtgtgtgtgtgtgtgtgtgtgtgtgtgtgtgttttcttcttgtcacgcttgcagcttgcatgtttggtgtgaattccgatctttgagaaactgatcataccttgtgtttgaatgctctgtgccctcccaaactctagccgcctgcccggtgcttagcggtgatttcctcctccggattccggagctcttggagaagttattatgtagcaaaggtctgcctgcacaaaccacaccggcagatatgaattagcattagacttgcaaaagagagcgagtgacaactgtattgatgtctactcttctaacaatatccattcccgcgtgctattgaagaacgtgcttcacggaaaatatagacatcccagcgttgctttaacgcttctagtcaaaaccttttctttgacatgacttatccataatcttgcctaatgattatagcaaaga

SEQ ID NO: 192 - DNA, 2465 bp, synthetic construct
  source 1..2465: mol_type = other DNA
gaaaaaggtggacttaagcctaaggattctctaggagaccaattttcatgagaccaatgtgcaaagcaacccaaaggggaagccaaaatgtcagtcctacacttggatagtgactcatttcatcctttaaaataattggatgtcactggcttaaatgtttcctgaattgtaccggaagacactcgcaagaaaagggcttaactaagttgtccaatgggccaatgaaatggctctgtaggtaaagaagcttgttccagggctggtgacctgcgttcagtccccaggacccacctgggaaaggaccaaactgagttccacaaattgccctctggtctccacacaaatgctaagacatacacacaccacaacacacacacacacacacacacacacacacacacacacacgggaagtaaataagtgtaaaaaatattttttgatgataataataatttgtgtaaggtctctcacctacccagtggcaggccaggatgaaagtgtcatgggggaggtggggcttggagggacagtgtgccaggggttgaggattcagcaatactgttcactcaacccaggcaaaggctgctgatagggcgctgggacacacttgcagagcctttcctgaaaggcagagggcgtccagggctctggtctctttgggacctggatgtccacttgattgttgtttcttcttctacaggctggccctgcagcatggggacggccatgttgtggattacctgtcccagccagtcatcgattacatcctcaagagtcagctgtacatcaacgcctcgggcatggtgagcaagggcgaggagctgttcaccggggtggtgcccatcctggtcgagctggacggcgacgtaaacggccacaagttcagcgtgtccggcgagggcgagggcgatgccacctacggcaagctgaccctgaagctgatctgcaccaccggcaagctgcccgtgccctggcccaccctcgtgaccaccctgggctacggcctgcagtgcttcgcccgctaccccgaccacatgaagcagcacgacttcttcaagtccgccatgcccgaaggctacgtccaggagcgcaccatcttcttcaaggacgacggcaactacaagacccgcgccgaggtgaagttcgagggcgacaccctggtgaaccgcatcgagctgaagggcatcgacttcaaggaggacggcaacatcctggggcacaagctggagtacaactacaacagccacaacgtctatatcaccgccgacaagcagaagaacggcatcaaggccaacttcaagatccgccacaacatcgaggacggcggcgtgcagctcgccgaccactaccagcagaacacccccatcggcgacggccccgtgctgctgcccgacaaccactacctgagctaccagtccgccctgagcaaagaccccaacgagaagcgcgatcacatggtcctgctggagttcgtgaccgccgccgggatcactctcggcatggacgagctgtacaaggctagcggcggtggctcatctggcggaggttcagcttggagccaccctcagtttgagaaaggcggaggaagcggcggcgggtcaggtggatcagcttggtctcaccctcaattcgagaaggactacaaggatgacgatgacaagtaatagcggatacccagctctctgctctattctccccgtgtcctctgccaacacactgtcagaccccggtttctctcctgcctctctgtttctctgtcttcatcttgactgttctccccactggctgacctaacccccacagtgtggagggcctgcgaagaaccgtggcgcaccccattccacagtcatctttggacaaactttcctctagtctccgggttgggggtgggtaagggaacagggtgggagttggggaaagtgcagcccttggagatgtactggtgtccgtatcccagcatgctctggggacatggctcaggcccttgccttcccagcatgccctttaccacaaagggctatttttttttctttttctttgtccacttcttgtagaacttggatgaaatcagtgtgtgtgtgagtgtgtttgtttgtttgtagtcttgatgctctcctgtggtttacttcccttctgataggacactatagccagtctcagcactcgtaagtgcggagggccacatccaggaaagaaggcagagcctctctgcttttccaatacacacacacacacacacacacacacacacacacacacacacacacagcacaccagcagcagcatccccagacccctttggtcaagagtaagactttcaggttctgaaacctggtacataagtctgggaagagtagggtttctcagaatttgagtccctggtttcagatgatcgtggtcttgatgctgtgtgtctgaccagtagcattgagtgggttctctgccaaccaggcatttgcagagag

SEQ ID NO: 193 - DNA, 4268 bp, synthetic construct
  source 1..4268: mol_type = other DNA
gaaaaaccacgaagacatgaccagaggttcctccaaagccccaagtagttggttgctaaagcagctctggaggttactaggagaccagttagcatccctaagtgacagagtctcaagagagtttttaagatatttctgccattgctaatttcaaagtagtaatgaactcatcacacttctaattgtgttttcctagtatcaagaacaggctctatataacaccaaaaaaaacaccatataggtaatgaaagcaaaccacaggcaatttctgtggtcattcttttgattcggtaatgtctccccccgtatcccatatggtagggttgaattgcatacatttttgtcctgttcaactatcctgctattataatattactcgtctaaatgtttagtgattgtttgaaatatgccaattttacctgtctggttagtataccctagagcagatatactcaagcttaatacaaatgaaaaggtgggcttttgtgttacctaatctgagctcagggtagcgtagcatgcactgttttaacagttgtcagatgcatatgacgcaacagcagttactgcgattccacgctccgcccccttcttcaggtagatctaggaaagtcagtttcctcactttagtttctccttgtagaatgtcctggtttccaagcgccagatgtgagttacactccacagtggtggcatcttgactcaggtgtgccttagctcgtgtatgcgttgtaattttgtgattgacaccacctgacttattcatcattttcagtaaaaagttgcaaaggccgctgcttcgagagaacatttgggaactgtcgctgtgatgctgcctgtgttgagcttggaaactgctgtttagattaccaggagacgtgcatagaaccagaacatatatggacttgcaacaaattcaggtgtggtgagaaaaggttgaccagaagcctctgtgcctgttcagatgactgcaaggacaagggcgactgctgcatcaactacagttctgtgtgtcaaggtgagaaaagttgggtagaagaaccatgtgagagcattaatgagccacagtgcccagcagggtttgaaacgcctcctaccctcttattttctttggatggattcagggcagaatatttacacacttggggtggacttcttcctgttattagcaaactaaaaaaatgtggaacatatactaaaaacatgagaccggtatatccaacaaaaactttccccaatcactacagcattgtcaccggattgtatccagaatctcatggcataatcgacaataaaatgtatgatcccaaaatgaatgcttccttttcacttaaaagtaaagagaaatttaatcctgagtggtacaaaggagaaccaatttgggtcacagctaagtatcaaggcctcaagtctggcacatttttctggccaggatcagatgtggaaattaacggaattttcccagacatctataaaatgtataatggttcagtaccatttgaagaaaggattttagctgttcttcagtggctacagcttcctaaagatgaaagaccacacttttacactctgtatttagaagaaccagattcttcaggtcattcatatggaccagtcagcagtgaagtcatcaaagccttgcagagggttgatggtatggttggtatgctgatggatggtctgaaagagctgaacttgcacagatgcctgaacctcatccttatttcagatcatggcatggaacaaggcagttgtaagaaatacatatatctgaataaatatttgggggatgttaaaaatattaaagttatctatggacctgcagctcgattgagaccctctgatgtcccagataaatactattcatttaactatgaaggcattgcccgaaatctttcttgccgggaaccaaaccagcacttcaaaccttacctgaaacatttcttacctaagcgtttgcactttgctaagagtgatagaattgagcccttgacattctatttggaccctcagtggcaacttgcattgaatccctcagaaaggaaatattgtggaagtggatttcatggctctgacaatgtattttcaaatatgcaagccctctttgttggctatggacctggattcaagcatggcattgaggctgacacctttgaaaacattgaagtctataacttaatgtgtgatttactgaatttgacaccggctcctaataacggaactcatggaagtcttaaccaccttctaaagaatcctgtttatacgccaaagcatcccaaagaagtgcaccccctggtacagtgccccttcacaagaaaccccagagataaccttggctgctcatgtaacccttcgattttgccgattgaggattttcaaacacagttcaatctgactgtggcagaagagaagattattaagcatgaaactttaccctatggaagacctagagttctccagaaggaaaacaccatctgtcttctttcccagcaccagtttatgagtggatacagccaagacatcttaatgcccctttggacatcctataccgtggacagaaatgacagtttctctacggaagacttctccaactgtctgtaccaggactttagaattcctcttagtcctgtccataaatgttcattttataaaaataacaccaaagtgagttacgggttcctctccccaccacaactaaataaaaattcaagtggaatatattctgaagctttgcttactacaaatatagtgccaatgtaccagagttttcaagttatatggcgctactttcatgacaccctactgcgaaagtatgctgaagaaagaaatggtgtcaatgtcgtcagtggtcctgtgtttgactttgattatgatggacgttgtgattccttagagaatctgaggcaaaaaagaagagtcatccgtaaccaagaaattttgattccaactcacttctttattgtgctaacaagctgtaaagatacatctcagacgcctttgcactgtgaaaacctagacaccttagctttcattttgcctcacaggactgataacagcgagagctgtgtgcatgggaagcatgactcctcatgggttgaagaattgttaatgttacacagagcacggatcacagatgttgagcacatcactggactcagcttctatcaacaaagaaaagagccagtttcagacattttaaagttgaaaacacatttgccaacctttagccaagaagactgatgactgtgccttctagttgccagccatctgttgtttgcccctcccccgtgccttccttgaccctggaaggtgccactcccactgtcctttcctaataaaatgaggaaattgcatcgcattgtctgagtaggtgtcattctattctggggggtggggtggggcaggacagcaagggggaggattgggaagacaatagcaggcatgctggggatgcggtgggctctatggaaggacgttcagcaactgtcgctgtgatgctgcctgtgtcagccttgggaactgctgtctggatttccaggagacctgtgtggaaccaagtaagtgtggtgggagaaggggcggggttacagggaggggtggagtcacgaaaaggggtggagtcacggaggtcaggaaaagatctcccggaagctgtgcatctttctgtctgtggttggattaactcaatgatttttctttttagacgccattcattcattcgttcgttcgttcgttcgttcgttcttcgttcttcgttcgctcatttgtttattgaaacaaggtttctccttgtagttctggaacttgctatatagaccaggctagactttaactcacagagattcacctgcctctgcccagagtacagagctcaaaagcttatctccaacatacccaacttcgttttcccaattataaacattataattgggaaaaagtttaaagacacttgcagggtattataattctaacacttctggatgttttagcaaagtgagattatgaatttaaagaatgctgctttgctgagctttgatgctgcagatattgctgacaaaattattcatggcctgaggttggtatttccatcttggtcaagcttcaagaatggcatatatggcttgatcatgatagtccttcttgtcctgggaatacttttattcttgaccattgtgataaaacttgcctttaacaacagcaatatgttggtggccaaaatacatggcttgaaactaaaaatgaacctccagagttattaatttaacagg

SEQ ID NO: 194 - DNA, 3143 bp, synthetic construct
  source 1..3143: mol_type = other DNA
gagcactatgacatcgacaatgccagcagtatcgcgccctcagatgcagacatcatccagcactacaaacagttccgaagccacacgcctaagttttccatccagaggcacagtcctctgggcttcgccaggcagtcccctatgcccttgggagcaagcagtctgacctaccagccttcttcatatggccaagggttaagaaccagctcccttagccactcggcctgccccactcccaaccctctgtccaggcacagcccagctcctttctccaaaccatctgccttctacaggaacagcccagcccgggaactgcatcttcctctgagggatgggggtacgctggaaatgcatggggacccctgccagcctggcatgttcaactatgccaccaggctagggagaagaagtaagagccctcaggccatggcatctcatggatcgagaccagggagtcgcctcaaacagcccatagcacagatccctctagaatcttctcctcccgtgggactctccatagaggaggtagagaggctcaacacccctcgacccagaaaccccagcatctgcagtgcagaccatgggaggtcctcttctgaagaagactgtagaaggcccctgtccagaaccaggaacccagcagatggcatccctgccccagaatcgtcttctgacagtgactcccatgattctttcacgtgctcagaaatggaatacgacagggagaagcccgtggtctacacttccaggatgcccaagttatctcaagtcaacgaatccgatgcagatgacgaagataatatggtgagcaagggcgaggagaccacaatgggcgtaatcaagcccgacatgaagatcaagctgaagatggagggcaacgtgaatggccacgccttcgtgatcgagggcgagggcgagggcaagccctacgacggcaccaacaccatcaacctggaggtgaaggagggagcccccctgcccttctcctacgacattctgaccaccgcgttcgcctacggcaacagggccttcaccaagtaccccgacgacatccccaactacttcaagcagtccttccccgagggctactcttgggagcgcaccatgaccttcgaggacaagggcatcgtgaaggtgaagtccgacatctccatggaggaggactccttcatctacgagatacacctcaagggcgagaacttcccccccaacggccccgtgatgcagaagaagaccaccggctgggacgcctccaccgagaggatgtacgtgcgcgacggcgtgctgaagggcgacgtcaagcacaagctgctgctggagggcggcggccaccaccgcgttgacttcaagaccatctacagggccaagaaggcggtgaagctgcccgactatcactttgtggaccaccgcatcgagatcctgaaccacgacaaggactacaacaaggtgaccgtttacgagagcgccgtggcccgcaactccaccgacggcatggacgagctgtacaaggggccaggtggtgcagggccaggtggtgcagggccaggtggtgcagggccaggtggtgcagggcccggtggtgcaggtccaggtggtgcaggtccaggtggtgcaggtccaggtggtgctatggtgagcaagggcgaggagctgttcaccggggtggtgcccatcctggtcgagctggacggcgacgtaaacggccacaagttcagcgtgtccggcgagggcgagggcgatgccacctacggcaagctgaccctgaagctgatctgcaccaccggcaagctgcccgtgccctggcccaccctcgtgaccaccctgggctacggcctgcagtgcttcgcccgctaccccgaccacatgaagcagcacgacttcttcaagtccgccatgcccgaaggctacgtccaggagcgcaccatcttcttcaaggacgacggcaactacaagacccgcgccgaggtgaagttcgagggcgacaccctggtgaaccgcatcgagctgaagggcatcgacttcaaggaggacggcaacatcctggggcacaagctggagtacaactacaacagccacaacgtctatatcaccgccgacaagcagaagaacggcatcaaggccaacttcaagatccgccacaacatcgaggacggcggcgtgcagctcgccgaccactaccagcagaacacccccatcggcgacggccccgtgctgctgcccgacaaccactacctgagctaccagtccaagctgagcaaagaccccaacgagaagcgcgatcacatggtcctgctggagttcgtgaccgccgccgggatcactctcggcatggacgagctgtacaagtatggagccagactgaaacccagaaggtaccatggacgcagggctgaggggggaccagtgggtacccctgcagcagcgtctggggctgcagacagcaccctgaagctggggcagcaggcaggcaacttcaactgggacaaccttttgaactggggcccaggctttggtcattatgtggatgtctttaaagatttggcctctctcccagaaaaagcagctggtaacgaagaaggtaaaagtggggcagctaaaccagccgccaaagatggggaggcagaacagtatgtgtgaggtgtatgtgtgggcaagaaacactcaaagcacggtgtggcttcccaccagcgggggtcacctttgtaaaacaggccagtatagaccggtggccagggacacatttaaagttaaccacaaagctgctcacatagactccaaacgactgactctttaatttaaatgtgctcagtggaacggaatgatcctcctgcatgcatcttgttttgtgatgagttttggggcatgcaacattgggaagtgttgctttgtgtttggtttgtggttttttgccgtttataccattgcagttgtagactcgagcttgtgctttcacagtggggttgcttgtttccattgtagtgttacggttgtgttttaccttgcaagatcatttaagtttagccaacccgtgtggagtgcaggaaggaggacttcccaccttggagggatgaaaggctgcacatttaacactcttcagatgaatagattcatatgtgatgtcgctcagacacaataagggcttg

SEQ ID NO: 195 - DNA, 3102 bp, synthetic construct
  source 1..3102: mol_type = other DNA
acagcctcacctttcaaagtctccttttgagctcctattctagtgttctgttcatggaagttctttcttccatcctttctccatagcaaaccttacaaacaacttctaaattgaaggcaacagagagctaacttgattctgccccactgtgcctgtcaggaaaatgggctgttggtcagagatgtctacgcctgtctactctatcagtttgtgactatagctcaaagtatcacttgcacaggtattcaatgagattatgtaacgaatcataagtaacagtcctgtcatctcatgccaagtaagttacaaatagaagttgagctctggattccctaatttgtaggtggtctactcaatgtccgtttttttcttaggatccaagaagagtttaccagacagatctgctcaaagaacttgtgacacccatttcctggaaacagcttagaaaaaaagaggggtggggggggaatcacacttcttccccaagccagggtttgactgatgtgacattacagcccctttcccaactcccatgggtctgaacacctgactttggcttctcaagaacaatgaagtgataaagtgatttaagcctgatcataaatgagcaatcctggaggctcaagtagaaaaaaaaaaaaaaacccggttgagacaggaagctggttcaggaacttgtcagcagaggcagcacttcgacgatcagagcttcttccttgggggtaacagtaagcagctgtcctgccgagctgagctgagctgagctcacagctggggaccctgtctgcgattgctggctaatgcccatggtgagcaagggcgaggaggtcatcaaagagttcatgcgcttcaaggtgcgcatggagggctccatgaacggccacgagttcgagatcgagggcgagggcgagggccgcccctacgagggcacccagaccgccaagctgaaggtgaccaagggcggccccctgcccttcgcctgggacatcctgtccccccagttcatgtacggctccaaggcgtacgtgaagcaccccgccgacatccccgattacaagaagctgtccttccccgagggcttcaagtgggagcgcgtgatgaacttcgaggacggcggtctggtgaccgtgacccaggactcctccctgcaggacggcacgctgatctacaaggtgaagatgcgcggcaccaacttcccccccgacggccccgtaatgcagaagaagaccatgggctgggaggcctccaccgagcgcctgtacccccgcgacggcgtgctgaagggcgagatccaccaggccctgaagctgaaggacggcggccactacctggtggagttcaagaccatctacatggccaagaagcccgtgcaactgcccggctactactacgtggacaccaagctggacatcacctcccacaacgaggactacaccatcgtggaacagtacgagcgctccgagggccgccaccacctgttcctggggcatggcaccggcagcaccggcagcggcagctccggcaccgcctcctccgaggacaacaacatggccgtcatcaaagagttcatgcgcttcaaggtgcgcatggagggctccatgaacggccacgagttcgagatcgagggcgagggcgagggccgcccctacgagggcacccagaccgccaagctgaaggtgaccaagggcggccccctgcccttcgcctgggacatcctgtccccccagttcatgtacggctccaaggcgtacgtgaagcaccccgccgacatccccgattacaagaagctgtccttccccgagggcttcaagtgggagcgcgtgatgaacttcgaggacggcggtctggtgaccgtgacccaggactcctccctgcaggacggcacgctgatctacaaggtgaagatgcgcggcaccaacttcccccccgacggccccgtaatgcagaagaagaccatgggctgggaggcctccaccgagcgcctgtacccccgcgacggcgtgctgaagggcgagatccaccaggccctgaagctgaaggacggcggccactacctggtggagttcaagaccatctacatggccaagaagcccgtgcaactgcccggctactactacgtggacaccaagctggacatcacctcccacaacgaggactacaccatcgtggaacagtacgagcgctccgagggccgccaccacctgttcctgtacggcatggacgagctgtacaagggaagcggagctactaacttcagcctgctgaagcaggctggagacgtggaggagaaccctggacctatggatcccaaaggatccctttcctggagaatacttctgtttctctccctggcttttgagttgagctacggaacaggtgagtgtccatttgtttaaagggtttgagtcttgtgtttagcagtttggaatcagcagagccccatggatggagaagccaagggctggggagtgctgttcagttgcctcttctttaaggagagtgcctctgggtttccactgtgtctttcaaagaggaagaaacctgttgagttccctgagccttgggctacaaggatttgtcccatctacactagtttctatggaaaccagaagctaaaggcacctgctatgtccatagtcagcttcctggactcaggctaaaattctgagtagctggtttatgtggctacccttctggcaaagacccaggctagggaccaaagctctgggacacttgacctatacttctgctgaggaaaacgactctcacatgtacatcattggcagacaaagaacaccggtccagtgaaaagcaagggtgataggagcaacaggtagaagtgggaaacctcagaccttaggctcacaccagacagtggctgcggtgtggtcatgctttcttataagagatgactccaaagcaccaagaagaggaaacgttgggattttggagcccagggttgcttacagaatggggaaagtgcaatcaggaaacttcaaggctctgcagtgggctcaagtgatggcaaagggttaaaggagcaggacttctctcccatccctctggttcttctcttttccaaggcaagctgttgttttctac

SEQ ID NO: 196 - DNA, 2341 bp, synthetic construct
  source 1..2341: mol_type = other DNA
cccaggcaggagatgagaaagcctgtggtaacgaggccacacctatggctctctgagatgtgactgcaatgcttgtttatgtgaagtaggctccacagccttgggatgaagctcatctgtaggatacatttctagcattcgtgaagttcttggttataccccagtaccatataaaccacatgtggtagttcgtgcctctgatctcaaactggggagagggaggcgggggaattagaagttgaaggtcatccttgactacatactgactgagttcaaggtcatcttgggtaacttaaaacccaagagactgaggagggatgcatagcttttcttagcccgttctgtgcctactggggcccaccgggggctttgagttctcactggttctgttccgtggaccactgtctaccctcagggtactacgcccttgaggactgtgtccaaagactactgtgcacttctctttttctcagtttcttcttagaattccttgtattaactagaaaaaaaaaaaagaatgatagtgaattgggtcaccttcgtcaaaagccgtgggtttggttagctaaccacaggatgtgtgttgggagaccgtgggaattaggtaataatagaaagtaccacacaccaaacacacacaccagtgtaagcactctaagcttgtatccctgtggaaacggttctggtagtcatagccagtgtctcttgtggtttgggttctgcattgtgactctcccgtctttgtgggccccaggtacttctccatacacttcccagaactctgaaggggtgcagacatggtgagcaagggcgaggaggataacatggccatcatcaaggagttcatgcgcttcaaggtgcacatggagggctccgtgaacggccacgagttcgagatcgagggcgagggcgagggccgcccctacgagggcacccagaccgccaagctgaaggtgaccaagggcggccccctgcccttcgcctgggacatcctgtcccctcagttcatgtacggctccaaggcctacgtgaagcaccccgccgacatccccgactacttgaagctgtccttccccgagggcttcaagtgggagcgcgtgatgaacttcgaggacggcggcgtggtgaccgtgacccaggactcctccctgcaggacggcgagttcatctacaaggtgaagctgcgcggcaccaacttcccctccgacggccccgtaatgcagaagaagaccatgggctgggaggcctcctccgagcggatgtaccccgaggacggcgccctgaagggcgagatcaagcagaggctgaagctgaaggacggcggccactacgacgccgaggtcaagaccacctacaaggccaagaagcccgtgcagctgcccggcgcctacaacgtcaacatcaagctggacatcacctcccacaacgaggactacaccatcgtggaacagtacgagcgcgccgagggccgccactccaccggcggcatggacgagctgtacaagggaggaggaggatcaggaggaggaggatcacctagggcgggaagtgctgtggacagcgccaaccacctgacctacttttttggcaacatcacccgggaagaggctgaagactacctggtccagggaggcatgaccgatgggctctacctgctacgccagagccgcaattacctgggtggttttgctttgtcggtggctcacaacaggaaggcacaccactacaccatcgagagggaacttaatggcacctacgccatctccgggggcagggcccatgccagcccagcagacctctgccattaccactcccaggaacctgatggccttatctgcctccttaagaagcccttcaaccggcccccgggagtacagcccaagaccggaccctttgaggacctgaaggagaacctcatcagggaatatgtgaaacagacctggaaccttcaggtgagtctgctgggcttgagcccacagagttctctaaacatattcagagcctgtgcctcctttacccaaagactaggatagcagatgcctgtgtgctgctgcccctcgctgcctctcttcccaccccatctgctcatgggaccaaagcggagtcctcacatcctctctgccctcctcctttcaccacgaaggagaaggttgtgttttaactttattcctttgagtttttcttctttgaaagtccaactctggctattcattaccaagatctgttgttctctcactaggaaggaaaagggaaccagccttctccacacttaatccatctccatgttgttatttccaccttgtttcttcctggtccaggctgctggccagggcctcctctg

SEQ ID NO: 197 - DNA, 2234 bp, synthetic construct
  source 1..2234: mol_type = other DNA
ctccctaagtgacacaagaggcacaaattcatagagtctgagtgactgatgatgctcagacacgtgctcctagatcagaacagtgttcccgttctggtgcctccctagattgtaaccttatatgggagagtagttagtggttagctgccaatccttctagacacacccagatgtacattttgaattcttcatagtgaaaagaagaggtgtgctacacctagtttttctctcggaatctggggcaaaggaactccgactctcctactagggcgtggcccacagcaccgcgaccctcctggggctagtaggaagtaatgatatcgccatcgtctttgcccagtctccagtctccctaagaacacgtcttttcctgagaattagagtggggcgggcccaactagcgaggaggacagtgagcgcctaacggagatttttttcctctaagggagattttaattggtctcctgaaagcaatcaagcacctatcatggtgctctttgttggctcttagacgtcagctttgtgggtgggtctccaacctcccgggtgacaaaggaacttcggagtccctaccatggaacgttcgcgccatttcctgtagccttgaggaaggcctgaaccagcactctagagccctgtaagcaaaggaacacctccgtgacggtccagttccactgagaaagactccccttttcaagtcttagaatattggcaatcatacgtaatagcaaaacctgtcaatggctctccgcccaatatggccaggcggaagctggtttctcttgcctatgtgtcgaaatcccattcgccagcatgcagttccctattccggtatccagtcaccaataagctctgtgcttcgttcggtcccgcctggtacacatgcgcagagcagcgctgcatctatgatcttagcgtctgatagagcgtcgacaccaccccctggctgtaactctatggttgttacagtggaagataggccgcctatataaggcgtgagcaggcgtgggagcgtctcttttcctctggcgcggtgagtgagttcggtcacggttttttacgatggtctcgtaatttttctttgggattttttttacacttattctgtgtctgtattctttgactgtttcattacagccaccgacgatcctattgtcatcatgggccgccgccccgcccggtggtgagtgctgaacccatgataacttcgtataaagtatcctatacgaagttatgcataacttcgtataatgtatgctatacgaagttatgcttacctgtcagccccagcacaggacaacatcttgttgatactgatgacatggaaagggtggagcctcactcggatatgaaagccatccttgccacaactctttaccatgtatttgttggcacaaatacgggcagcctccagtgcttcagaagagagttgctcatattcatctgacaccatatggccacaaagtgggaattcatcaacttttgctttcttccgtcccaaatcaaagattcggatcttagcatcagggacaccacggcagaaacgagactttgggtatggcttgttcttacaataccggtaactatagaaggaaggaaactcaggtgtgattaatggtgacaacaggactaaaccagctctgaatccagtttccattcagggtaactgattctaaggcaacttgttgttaaacaattacacaaattataaaacagaaaaagaatcatgcactataacttcgtataggatactttatacgaagttatcaatcttcctactgtgaaaactgagggaaaaatgcatttctttcgaaagactttttttttatgggtggactctctgccacttagagaccctgaagtaaagactgacttcgggttttctttaatactttactgggacctttattttgaggctgtgggtggcgttacccaatactaaagcgcttgggtagaactagcatgtccgtgtgcatccaatcctctgcgtcgcaaatgagcctttttacaacgcctaccaggccttcttggtcacttttgcgtccgtcttttatttccggccttgagctttgtggtttttaacaggacaccaagggctgaccagtccgtaggcgccgcctaaacgcgtgtcctgaagaggacgccatattctcttaacgtggctaaggcgggtcttctgtcacatgctaggaaaattgtgatatctcacccaactctggttagagggtgatgct

SEQ ID NO: 198 - DNA, 3230 bp, synthetic construct
  source 1..3230: mol_type = other DNA
cgtggccaacaccttactctcagggcatgtcactctgtccttaactcccgtgcagtggtttgcccgagagggttccgccttcatcacgctctccgcctcggtctttagcctcctggccatcgccatcgagagacaagtggccctcgccaaggtcaagctctacggcagtgacaaaagctgccgaatgctgatgctcatcggggcctcttggctgatatcgctgattctgggtggcttgcccatcctgggctggaattgtctgaaccagctggaggcctgctccaccgtgctgcctctctatgctaagcactacgtgctctgcgtggtcaccatcttctccgtcatcttactggctatcgtggctctgtacgtccgaatctactttgtagtccgctccagccacgcggatgttgctggtcctcagacgctagccctgctcaagacggtcaccatcgtactgggtgttttcatcatctgctggctgccggcttttagcatccttctcttagactccacctgtcccgttcgggcctgccctgtcctctacaaagcccactatttttttgcctttgccacccttaactcactgctcaatcctgtcatctatacgtggcgtagccgggaccttcggagggaggtgctgcggcccctgcagtgctggcggagagggaagggagtgacgggacgcagaggtgggaaccctggtcaccgactcctgcctctccgcagctccagctccctggagagaggcatgcatatgcctacatcaccgacatttctggagggtaacacagtggtcggatccggcgccacgaacttctctctgttaaagcaagcaggagacgtggaagaaaaccccggtccttctagaggaatcagcctaatcgccgcactcgcggtggactacgtaatcggcatggagaatgccatgccctggaatttgcctgccgacctggcatggttcaaaaggaacacgctgaataagcctgtcattatgggaaggcatacgtgggagtctataggcaggcctctgccaggtcgcaagaacataattctgtccagccagcctagtacagacgaccgtgttacatgggtgaaaagtgtagacgaggccattgccgcctgcggagatgttcctgaaattatggtcattggcggaggcagggtaattgagcagtttctccctaaggcccagaagctctaccttacccacatcgacgcggaggtggaaggcgacacccattttcccgattacgagcccgacgattgggaaagtgtcttctctgaattccacgacgccgatgcccaaaactcccactcctattgttttgagatccttgaaagaagaggggctcccaaaaaaaagagaaaagtctacccctacgatgtccccgattacgccggtagctcagagctcatcatctctggcagttccgggggctttctgaggaatattggaaaagagtaccaggaggcagccgaaaatttcatgaggttcatgaacgatcaaggtgcatatgcccccaacaccctgagggatctgcgtctcgtctttcactcttgggcaaggtggtgtcatgctcgtcaactggcgtggtttcctatcagccccgaaatggcgcgggaatacttcctgcagcttcacgacgctgacctggcaagcactacgattgataagcattacgcaatgctgaatatgctgctctcacattgtgggttgcctccactgagcgacgacaagtctgtctcattggctatgaggcgaatcaggcgggaagcagctaccgagaagggtgaaaggactggacaggctatccccctgagatgggacgacctgaagctgctggatgtactgctcagcagaagcgaacggctggtggatctcaggaaccgagcgtttctttttgtggcatataacaccctgatgcgtatgtctgagatctcacggattcgggttggggacctagaccagacaggcgataccgtgaccctacacatctcacacacaaaaactatcactactgcggctgggctggacaaagtgctttccagacgtacgaccgccgtgctgaacgattggcttgacgtaagtggccttcgggagcatccagacgccgtgctgtttccccccatccatagatctaacaaggctcgaattacaactactcctctgaccgcgcccgctatggagaagatcttctccgatgcttgggtcctcctgaacaagagagacgctacccctaataagggaaggtacagaacttggacgggtcattctgccagagtaggtgccgcaatcgacatggccgagaagcaggtgtccatggtggagattatgcaggaggggacctggaaaaaacctgaaacccttatgaggtacctgcgaagaggtggggtgagtgtgggcgctaacagtaggctgatggacagttgaagggaaaatgtgaactgatagttaaccaagccacagagagctctgtggggagagaccaggtgacctcatgatgtccctcagtgctgcaggtctggagaaactgaccacagctcataggtcaggtgaccaacggaggcactgactaatcagattgtagtactgtgactgtggggatcattaagggtctagggtgaccgcaggctggagcttagggctagacatttgccacttgatacaaagggtgtcagcattctgtctgtcctatcttccagcccccctggttcccgtcctgccgcctcctttttagggcctctctacatagccttgactggcttgaactttctatgcagaccgggctgacctggagctcacagcagtctatctacctgtctgtgttctgagggttgggtagcagctcacccagctcctgcccccttccataaacaaccttaggcctctgaaggaaatgctgtctgcagcggacccaaggcttcttccctgtctttctgaggcctaaatccacagcttccccaatttcatcaactgctgcttcttctctttcctttcatattcggggaaaggaaaccactgtgggggcagggaggaggcctggcatcccagtctttattttcagatctcactggccactcgctttattggtgagccgagagggatcaggtgaggcagtatggggcagctgttgaggagactttgggctctcactctcggggaggtgatggtcattcctggaactcctccccccacacccagcctttctccccatgagctcatcacc

SEQ ID NO: 199 - DNA, 3230 bp, synthetic construct; identical to SEQ ID NO: 198
  source 1..3230: mol_type = other DNA

SEQ ID NO: 200 - DNA, 2638 bp, synthetic construct
  source 1..2638: mol_type = other DNA
aacctcccacacctccccctgaacctgaaacataaaatgaatgcaattgttgttgttaacttgtttattgcagcttataatggttacaaataaagcaatagcatcacaaatttcacaaataaagcatttttttcactgcattctagttgtggtttgtccaaactcatcaatgtatcttatcatgtctggatctgcgactctagaggatcataatcagccataccacatttgtagaggttttacttgctttaaaaaacctcccacacctccccctgaacctgaaacataaaatgaatgcaattgttgttgttaacttgtttattgcagcttataatggttacaaataaagcaatagcatcacaaatttcacaaataaagcatttttttcactgcattctagttgtggtttgtccaaactcatcaatgtatcttatcatgtctggatctgcgactctagaggatcataatcagccataccacatttgtagaggttttacttgctttaaaaaacctcccacacctccccctgaacctgaaacataaaatgaatgcaattgttgttgttaacttgtttattgcagcttataatggttacaaataaagcaatagcatcacaaatttcacaaataaagcatttttttcactgcattctagttgtggtttgtccaaactcatcaatgtatcttatcatgtctggatccccatcaagctgatccggaacccttaatataacttcgtataatgtatgctatacgaagttattaggtccctcgacctgcagcccaagctagatcgaatttctagactcgagtggatccgccaccatgtcggattttgacagcaacccgtttgcggatccggatctcaacaacccgttcaaggacccatctgtcacacaggtgacaagaaatgtgccaccgggacttgatgaatacaaccctttctccgactctcgcacgcctccaccaggcagtgtgaaaatgcctaatgtacccaacacccagccagcaataatgaagccaacagaggaacatccagcttacacacagatcacaaaggaacatgccttggctcaagctgaactgctcaagcgccaagaagagctggagagaaaagctgcagagttggatcgtcgtgagcgcgagatgcagaacctgagccagcatgggagaaaaaataattggcctcctcttcctagcaattttcccgtgggaccttctttctatcaagacttttctgttgacattcctgtagaattccagaagacggtgaagcttatgtactacctatggatgttccatgcagtgaccctgtttctgaacatcttcggatgcttggcctggttttgtgttgattcctcgagagcagtcgactttgggctgagcatcctgtggttcctgctcttcactccctgctcctttgtctgttggtacagaccgctgtacggggccttcaggagcgacagttccttcaggttctttgtgttcttcttcgtctatatttgtcagtttgctgtccatgtgctccaggctgcaggatttcataactggggaaactgtggttggatctcgtccctcactggtctcaacaagaacattccagtcgggatcatgatgataatcatcgcagcgctcttcacagcgtccgcggtcatctcgctcgtcatgtttaaaaaagtgcatggactgtaccgcacaacaggtgctagttttgagaaggcccagcaagagtttgcaacgggagtgatgtccaataaaactgttcagacagcggctgcaaacgccgcctcaaccgcagcaaccagcgcggcgcagaacgccttcaagggtaaccagatgtagcttaagtttaaaccgctgatcagcctcgactgtgccttctagttgccagccatctgttgtttgcccctcccccgtgccttccttgaccctggaaggtgccactcccactgtcctttcctaataaaatgaggaaattgcatcgcattgtctgagtaggtgtcattctattctggggggtggggtggggcaggacagcaagggggaggattgggaagacaatagcaggcatgctggggatgcggtgggctctataattcacagtgtcgcgagttagactatgtaagcagaattttaatcatttttaaagagcccagtacttcatatccatttctcccgctccttctgcagccttatcaaaaggtattttagaacactcattttagccccattttcatttattatactggcttatccaacccctagacagagcattggcattttccctttcctgatcttagaagtctgatgactcatgaaaccagacagattagttacatacaccacaaatcgaggctgtagctggggcctcaacactgcagttcttttataactccttagtacactttttgttgatcctttgccttgatccttaattttcagtgtctatcacctctcccgtcaggtggtgttccacatttgggcctattctcagtccagggagttttacaacaatagatgtattgagaatccaacctaaagcttaactttccactcccatgaatgcctctctcctttttctccatttataaactgagctattaaccattaatggtttccaggtggatgtctcctccccc

SEQ ID NO: 201 - DNA, 2638 bp, synthetic construct
  source 1..2638: mol_type = other DNA
aacctcccacacctccccctgaacctgaaacataaaatgaatgcaattgttgttgttaacttgtttattgcagcttataatggttacaaataaagcaatagcatcacaaatttcacaaataaagcatttttttcactgcattctagttgtggtttgtccaaactcatcaatgtatcttatcatgtctggatctgcgactctagaggatcataatcagccataccacatttgtagaggttttacttgctttaaaaaacctcccacacctccccctgaacctgaaacataaaatgaatgcaattgttgttgttaacttgtttattgcagcttataatggttacaaataaagcaatagcatcacaaatttcacaaataaagcatttttttcactgcattctagttgtggtttgtccaaactcatcaatgtatcttatcatgtctggatctgcgactctagaggatcataatcagccataccacatttgtagaggttttacttgctttaaaaaacctcccacacctccccctgaacctgaaacataaaatgaatgcaattgttgttgttaacttgtttattgcagcttataatggttacaaataaagcaatagcatcacaaatttcacaaataaagcatttttttcactgcattctagttgtggtttgtccaaactcatcaatgtatcttatcatgtctggatccccatcaagctgatccggaacccttaatataacttcgtataatgtatgctatacgaagttattaggtccctcgacctgcagcccaagctagatcgaatttctagactcgagtggatccgccaccatgtcggattttgacagcaacccgtttgcggatccggatctcaacaacccgttcaaggacccatctgtcacacaggtgacaagaaatgtgccaccgggacttgatgaatacaaccctttctccgactctcgcacgcctccaccaggcagtgtgaaaatgcctaatgtacccaacacccagccagcaataatgaagccaacagaggaacatccagcttacacacagatcacaaaggaacatgccttggctcaagctgaactgctcaagcgccaagaagagctggagagaaaagctgcagagttggatcgtcgtgagcgcgagatgcagaacctgagccagcatgggagaaaaaataattggcctcctcttcctagcaattttcccgtgggaccttgtttctatcaagacttttctgttgacattcctgtagaattccagaagacggtgaagcttatgtactacctatggatgttccatgcagtgaccctgtttctgaacatcttcggatgcttggcctggttttgtgttgattcctcgagagcagtcgactttgggctgagcatcctgtggttcctgctcttcactccctgctcctttgtctgttggtacagaccgctgtacggggccttcaggagcgacagttccttcaggttctttgtgttcttcttcgtctatatttgtcagtttgctgtccatgtgctccaggctgcaggatttcataactggggaaactgtggttggatctcgtccctcactggtctcaacaagaacattccagtcgggatcatgatgataatcatcgcagcgctcttcacagcgtccgcggtcatctcgctcgtcatgtttaaaaaagtgcatggactgtaccgcacaacaggtgctagttttgagaaggcccagcaagagtttgcaacgggagtgatgtccaataaaactgttcagacagcggctgcaaacgccgcctcaaccgcagcaaccagcgcggcgcagaacgccttcaagggtaaccagatgtagcttaagtttaaaccgctgatcagcctcgactgtgccttctagttgccagccatctgttgtttgcccctcccccgtgccttccttgaccctggaaggtgccactcccactgtcctttcctaataaaatgaggaaattgcatcgcattgtctgagtaggtgtcattctattctggggggtggggtggggcaggacagcaagggggaggattgggaagacaatagcaggcatgctggggatgcggtgggctctataattcacagtgtcgcgagttagactatgtaagcagaattttaatcatttttaaagagcccagtacttcatatccatttctcccgctccttctgcagccttatcaaaaggtattttagaacactcattttagccccattttcatttattatactggcttatccaacccctagacagagcattggcattttccctttcctgatcttagaagtctgatgactcatgaaaccagacagattagttacatacaccacaaatcgaggctgtagctggggcctcaacactgcagttcttttataactccttagtacactttttgttgatcctttgccttgatccttaattttcagtgtctatcacctctcccgtcaggtggtgttccacatttgggcctattctcagtccagggagttttacaacaatagatgtattgagaatccaacctaaagcttaactttccactcccatgaatgcctctctcctttttctccatttataaactgagctattaaccattaatggtttccaggtggatgtctcctccccc

SEQ ID NO: 202 - DNA, 4033 bp, synthetic construct
  source 1..4033: mol_type = other DNA
aacctcccacacctccccctgaacctgaaacataaaatgaatgcaattgttgttgttaacttgtttattgcagcttataatggttacaaataaagcaatagcatcacaaatttcacaaataaagcatttttttcactgcattctagttgtggtttgtccaaactcatcaatgtatcttatcatgtctggatctgcgactctagaggatcataatcagccataccacatttgtagaggttttacttgctttaaaaaacctcccacacctccccctgaacctgaaacataaaatgaatgcaattgttgttgttaacttgtttattgcagcttataatggttacaaataaagcaatagcatcacaaatttcacaaataaagcatttttttcactgcattctagttgtggtttgtccaaactcatcaatgtatcttatcatgtctggatctgcgactctagaggatcataatcagccataccacatttgtagaggttttacttgctttaaaaaacctcccacacctccccctgaacctgaaacataaaatgaatgcaattgttgttgttaacttgtttattgcagcttataatggttacaaataaagcaatagcatcacaaatttcacaaataaagcatttttttcactgcattctagttgtggtttgtccaaactcatcaatgtatcttatcatgtctggatccccatcaagctgatccggaacccttaatataacttcgtataatgtatgctatacgaagttattaggtccctcgacctgcagcccaagctagatcgaatttctagactcgagtggatccgccaccatggcgggaggaatcaaagtgtcggtgtggtcggcggttggtccagggccccggtgctggggggccgggggcggcggcggcgccacatggctgctcttggtcgtcgccggctgcgtggtctgcggctcagctgatgtaaatgtggtcatgcttcaggaatcccaagttgatatgaattccagtcaacaattctgttataaaaatgtgcttatcccaaagtggcatgatatatggacacggatacaggttcgggtaaatagttccaagttggtccgagttacccaggtggacaatgaggagaagctgaaggagctagagcagtttagtatctggaactttttttcttcttttttaaaagagaaattgaatgacacctatgttaacgtgggtctgtacagcactaaaacctgcctcaaggttgagatgatagagaaggacaccacgtacagtgtcactgtgacccggagatttgaccccaaactcttccttgttttcctcctcggactgacactgtttttttgtggagacttgttgagcaggagtcaaattttctactattccactgggatgagtgtgggaatcgtggcctctctcttaatcgtcatttttatgatctctaagtttatgcccaagagaagccccatttacgtcatcctggtaggaggctggtccttctctctgtacctcattcagctagtttttaagaatttacaggagatatggaggagttactggcattatcttctaagctacatcctcacagttggattcatgagttttgcagtgtgctacaaatatgggcccctggaaaatgaacgaagcattaacctgctgacctggacgctgcagctgctgggcctgggactcatgtattccagtatccagatcccgcacgttgcctttgctctcatcgtcattgcactgtgcactaagaacctggaataccctatccactggctgtgcagcacctacagaaggatgtgtaaggcatcaggaaagcctgtcccccctcgcctcctgacagaagaagagtatcggatacaaggagaggtggagacccaaaaggctttacaggaactccgagaattttgtaacagtccggagtgctctgcctggaagaccatatctcgaattcagtctccaaaaagatttgctgactttgtggaaggttctttccacctcacgccaaatgaagtttctgttcacgaacaggagtatggattagggagcatctttacccaggatgaggagctgtcctcagaagaggagggctcagagtaccccactttcacacagaacaatttcttgactggtggctctggaggtcgtaccggcatgaagaaaaatcgcgcttttttgaagtgggcagggggcaagtatcccctgcttgatgatattaaacggcatttgcccaagggcgaatgtctggttgagccttttgtaggtgccgggtcggtgtttctcaacaccgacttttctcgttatatccttgccgatatcaatagcgacctgatcagtctctataacattgtgaagatgcgtactgatgagtacgtacaggccgcacgcgagctgtttgttcccgaaacaaattgcgccgaggtttactatcagttccgcgaagagttcaacaaaagccaggatccgttccgtcgggcggtactgtttttatatttgaaccgctacggttacaacggcctgtgtcgttacaatctgcgcggtgagtttaacgtgccgttcggccgctacaaaaaaccctatttcccggaagcagagttgtatcacttcgctgaaaaagcgcagaatgcctttttctattgtgagtcttacgccgatagcatggcgcgcgcagatgatgcatccgtcgtctattgcgatccgccttatgcaccgctgtctgcgaccgccaactttacggcgtatcacacaaacagttttacgcttgaacaacaagcgcatctggcggagatcgccgaaggtctggttgagcgccatattccagtgctgatctccaatcacgatacgatgttaacgcgtgagtggtatcagcgcgcaaaattgcatgtcgtcaaagttcgacgcagtataagcagcaacggcggcacacgtaaaaaggtggacgaactgctggctttgtacaaaccaggagtcgtttcacccgcgaaaaaagaattccaccacactggactagtggatccgagctcggtaccaagcttaagtttaaaccgctgatcagcctcgactgtgccttctagttgccagccatctgttgtttgcccctcccccgtgccttccttgaccctggaaggtgccactcccactgtcctttcctaataaaatgaggaaattgcatcgcattgtctgagtaggtgtcattctattctggggggtggggtggggcaggacagcaagggggaggattgggaagacaatagcaggcatgctggggatgcggtgggctctataattcacagtgtcgcgagttagactatgtaagcagaattttaatcatttttaaagagcccagtacttcatatccatttctcccgctccttctgcagccttatcaaaaggtattttagaacactcattttagccccattttcatttattatactggcttatccaacccctagacagagcattggcattttccctttcctgatcttagaagtctgatgactcatgaaaccagacagattagttacatacaccacaaatcgaggctgtagctggggcctcaacactgcagttcttttataactccttagtacactttttgttgatcctttgccttgatccttaattttcagtgtctatcacctctcccgtcaggtggtgttccacatttgggcctattctcagtccagggagttttacaacaatagatgtattgagaatccaacctaaagcttaactttccactcccatgaatgcctctctcctttttctccatttataaactgagctattaaccattaatggtttccaggtggatgtctcctcccccaatattacctgatgtatcttacatattgccaggctgatattttaagacattaaaaggtatatttcattattgagccacatggtattgattactgcttactaaaattttgtcattgtacacatctgtaaaaggtggttccttttggaatgcaaagttcaggtgtttgttgtctttcctgacctaaggtcttgtgagcttg

SEQ ID NO: 203 - DNA, 2384 bp, synthetic construct
  source 1..2384: mol_type = other DNA
ccaatacaacgacacagatgatatttttgcccgagaaccatttgtggcccatttcactctccctagcaaaagtaagaggggtaaaaaaatctgggcctggtacaaggaaataggagggggatgtggctggttttcctgtgggttggtttctgggggaagcagaggtggttatgtagaaggcctggcagctgtggcagcctcagcttcctggaccttgcagctcttccaagtgtggtgctggttcctctccacaccactcccaaggatgttgagaaggagctgaatgccctctatgatgtgtttctggatgtctaccagcgctggcagaatgaggtaggggtgatagattccatggcagaggggatggtgcaaatgccttttagcaagacgcagtggcttctgtcgtctctagaatgtgattctgcttggagacttcaatgcagactgtgcatcgctgacaaaaaaacgtctgaaaagcctgctactccggactaaggcaggcttccactgggtgattcctgatggggaggatactacagtgcgggccagtactaactgtacctatgaccgaattgtggtgcatggacagggctgccaaatgctgctgaaggctgcagctacctttgactttcccaagaggtttcagctgactgaggaagaggtagagaagctgggtgggcaaaatggctgagggcagaattgtggaggtgagccagatactgacacttcattttgttctctcctcaggctctccgcatcagtgaccattatcctgtagaagtggaactgtctcaggccctgcagtcgacggtaccgcgggcccgggatccaccggtcgccaccatggtgagcaagggcgaggaggataacatggcctctctcccagcgacacatgagttacacatctttggctccatcaacggtgtggactttgacatggtgggtcagggcaccggcaatccaaatgatggttatgaggagttaaacctgaagtccaccaagggtgacctccagttctccccctggattctggtccctcatatcgggtatggcttccatcagtacctgccctaccctgacgggatgtcgcctttccaggccgccatggtagatggctccggataccaagtccatcgcacaatgcagtttgaagatggtgcctcccttactgttaactaccgctacacctacgagggaagccacatcaaaggagaggcccaggtgaaggggactggtttccctgctgacggtcctgtgatgaccaactcgctgaccgctgcggactggtgcaggtcgaagaagacttaccccaacgacaaaaccatcatcagtacctttaagtggagttacaccactggaaatggcaagcgctaccggagcactgcgcggaccacctacacctttgccaagccaatggcggctaactatctgaagaaccagccgatgtacgtgttccgtaagacggagctcaagcactccaagaccgagctcaacttcaaggagtggcaaaaggcctttaccgatgtgatgggcatggacgagctgtacaaggaccattatcctgtagaagtggaactgtctcaggctacacccctgagtatcccaccccactacttagccgctctactgctgtcactcctgccatctcagctggactagatagccattgacttgaccagggcactggtagtctcagatgtgaaagtcaatgacagcttttttaaatagctgcttgctattctgagaaagctagggctgggagtataactcagcaacaagtgccttgggcttgaatcctgttgggtagacaggacttcacctgaggtagttaggaacaaagctccagtagaaatgggctcagatcatacctaagatttctgcaactgatacaaatgagctcatactggaaaaaccttaggtctaagtaatcttgcttctccatgcactatactacatggctctgccagtgttgtcaggtttaaaatattcaataaaatcattttaaccttttgcatgtatgcttaattcaataagctgtcccaattgaccaaatttaaaacctcatggtatttaagaatcagaaacaaaaacataagcgaacttgatgcgagattttattattgaacgatttggtagggtataggagaactattgaagccttcaggaatgcagggctctccacttgtccagaggaccacgattggggatatatttgacaccacagccatcaggaatgagccgcttctcagcaaccatgtcttcaaattcatctgcattaaacttggtgaagccccacttctttgagatgtggatctagaaggaaatagaaaataacaaactcagcaaggaggaccagagcaagaaaacagaagaacttaaatacc

SEQ ID NO: 204 - DNA, 4660 bp, synthetic construct
  source 1..4660: mol_type = other DNA
cggggaggggcagaaagcaaacctccccgccccctccactctccacccttgcaagctcccctgccgcgggcagcctcttgcccactggagtctaaggactggccgggtgagaggccgagaccagggggcgatcggccgccacttccccagtccaccttaagaggaccaagtagccagcccgccgcgccgacctcagaaaaacaagtttgcgcaaagtggtgcgcggccagcctctgggcagagggagcggtgcttccaccgcctggcagccctgcgcgcggcggcgcaggtccgagcggctggcggggacccgcacgggcagagcgggctcgcgcagagccgaggcgggcggcgcagctcgcggggcgcactggggcgcgggcgggaaggtgcgggcgcgaggagggggcgctcggccgggccgccctcgcgctggcctcgcgacggctccgcacagcccgcactcgctctgcgagctgtccccgctcgcgcttgctctccgatctccgtccccgctccctctccctcttcctctccccctctttccttctccctcgctatccgctcccccgcccccgtgcctctggctctgcgcctggctccctcgggtccgctcccctttcccgccggcctggcccggcgtcacgctcccggagtctccccgctcggcggcgtctcattgtgggagggggtcagatcaccccgccgggcggtggcgctggggggcagcggagggggaggggccttagtcgttcgcccgcgccgcccgcccgcctgccgagcgcgctcaccgccgctctataacttcgtataatgtatgctatacgaagttattcgcgatgaataaatgaaagcttgcagatctgcgactctagaggatctgcgactctagaggatcataatcagccataccacatttgtagaggttttacttgctttaaaaaacctcccacacctccccctgaacctgaaacataaaatgaatgcaattgttgttgttaacttgtttattgcagcttataatggttacaaataaagcaatagcatcacaaatttcacaaataaagcatttttttcactgcattctagttgtggtttgtccaaactcatcaatgtatcttatcatgtctggatctgcgactctagaggatcataatcagccataccacatttgtagaggttttacttgctttaaaaaacctcccacacctccccctgaacctgaaacataaaatgaatgcaattgttgttgttaacttgtttattgcagcttataatggttacaaataaagcaatagcatcacaaatttcacaaataaagcatttttttcactgcattctagttgtggtttgtccaaactcatcaatgtatcttatcatgtctggatctgcgactctagaggatcataatcagccataccacatttgtagaggttttacttgctttaaaaaacctcccacacctccccctgaacctgaaacataaaatgaatgcaattgttgttgttaacttgtttattgcagcttataatggttacaaataaagcaatagcatcacaaatttcacaaataaagcatttttttcactgcattctagttgtggtttgtccaaactcatcaatgtatcttatcatgtctggatccccatcaagctgatccggaacccttaatataacttcgtataatgtatgctatacgaagttatcctctcggtgcgggaccatgaagctgctgccgtcggtggtgctgaagctctttctggctgcagttctctcggcactggtgactggcgagagcctggagcggcttcggagagggctagctgctggaaccagcaacccggaccctcccactgtatccacggaccagctgctacccctaggaggcggccgggaccggaaagtccgtgacttgcaagaggcagatctggaccttttgagagtcactttatcctccaagccacaagcactggccacaccaaacaaggaggagcacgggaaaagaaagaagaaaggcaaggggctagggaagaagagggacccatgtcttcggaaatacaaggacttctgcatccatggagaatgcaaatatgtgaaggagctccgggctccctcctgcatctgccacccgggttaccatggagagaggtgtcatgggctgagcctcccagtggaaaatcgcttatatacctatgaccacacaaccatcctggccgtggtggctgtggtgctgtcatctgtctgtctgctggtcatcgtggggcttctcatgtttaggtaccataggagaggaggttatgatgtggaaaatgaagagaaagtgaagttgggcatgactaattcccacccggatccaccggtcgccaccatggtgagcaagggcgaggaggtcatcaaagagttcatgcgcttcaaggtgcgcatggagggctccatgaacggccacgagttcgagatcgagggcgagggcgagggccgcccctacgagggcacccagaccgccaagctgaaggtgaccaagggcggccccctgcccttcgcctgggacatcctgtccccccagttcatgtacggctccaaggcgtacgtgaagcaccccgccgacatccccgattacaagaagctgtccttccccgagggcttcaagtgggagcgcgtgatgaacttcgaggacggcggtctggtgaccgtgacccaggactcctccctgcaggacggcacgctgatctacaaggtgaagatgcgcggcaccaacttcccccccgacggccccgtaatgcagaagaagaccatgggctgggaggcctccaccgagcgcctgtacccccgcgacggcgtgctgaagggcgagatccaccaggccctgaagctgaaggacggcggccactacctggtggagttcaagaccatctacatggccaagaagcccgtgcaactgcccggctactactacgtggacaccaagctggacatcacctcccacaacgaggactacaccatcgtggaacagtacgagcgctccgagggccgccaccacctgttcctggggcatggcaccggcagcaccggcagcggcagctccggcaccgcctcctccgaggacaacaacatggccgtcatcaaagagttcatgcgcttcaaggtgcgcatggagggctccatgaacggccacgagttcgagatcgagggcgagggcgagggccgcccctacgagggcacccagaccgccaagctgaaggtgaccaagggcggccccctgcccttcgcctgggacatcctgtccccccagttcatgtacggctccaaggcgtacgtgaagcaccccgccgacatccccgattacaagaagctgtccttccccgagggcttcaagtgggagcgcgtgatgaacttcgaggacggcggtctggtgaccgtgacccaggactcctccctgcaggacggcacgctgatctacaaggtgaagatgcgcggcaccaacttcccccccgacggccccgtaatgcagaagaagaccatgggctgggaggcctccaccgagcgcctgtacccccgcgacggcgtgctgaagggcgagatccaccaggccctgaagctgaaggacggcggccactacctggtggagttcaagaccatctacatggccaagaagcccgtgcaactgcccggctactactacgtggacaccaagctggacatcacctcccacaacgaggactacaccatcgtggaacagtacgagcgctccgagggccgccaccacctgttcctgtacggcatggacgagctgtacaagggaagcggagctactaacttcagcctgctgaagcaggctggagacgtggaggagaaccctggacctatggaaccggccggcccggcccctggccgcctagggccgctgctgctctgcctgctgctctccgcgtcctgtttctgtacaggtaagcaccctcagctcctactgccaccctccccaagctgcgggctcaggccccgcacactgtcgctaagctaatgtcgacaaatccctgtaacgggggttacagatgcagagttgaggcccagagagggtcagccacttgcccaaggtcacatagcctaggctagaagccgggatagaactcttcttatccggatctgccttgtggactgtgactgggtagcccagcgttgggctgcggggtataggaatgagttggtttaccgtaccctttgccaaacctgaatggggaagcagactggcaattgctttgggcaatcgggctcctggtttccccatatgctcccttgctagacttgattggagagagggtcggggcagaggttgggcgcgctgttgagctgttgggatgggggaagagtgagctttcgccctagtaccagagcaagcagggttagtgtatggaggtagagacaggaagagaggccggagtaatccacggacccttgggagacacagtggatttacctgtggtgggcacagccctctctggatggtctcctccccgccacccccctgccttccttaggcaggcttccagtagctccctgcagttccagcatgtacctgtggctctgagcttgtcttctttgttggcctacatcaaacacctggctgtctccagcaggagggctctgaaggccggttggccaaggag

SEQ ID NO: 205 - DNA, 3140 bp, synthetic construct
  source 1..3140: mol_type = other DNA
caaggatgtagtatctagctcgagagttctaaatatccatcatcagtctgctcattcatcttttaattcacccataaaggctttgaaaactaaggctggagatgaacttataggagcctgccaggccgtggagagtgaggaagcagagatgacggagatgatgtctttccttgtcctgtgaaatggattgtgggtagaggttccggagataatgcctcttgctggaaacagtctgggcagttctgttcccgccattcacagaattcttctcactttctaggtcttcttggtcctaagggtgagacaggagatgttggaatgacaggagctgaagggccacggggcttccccggaacccctggcaggaaaggagagcctggagaagccgcttatgtgtatcgctcagcgttcagtgtggggctggagacccgcgtcactgttcccaatgtacccattcgctttactaagatcttctacaaccaacagaatcattatgacggcagcactggcaagttctactgcaacattccgggactctactacttctcttaccacatcacggtgtacatgaaagatgtgaaggtgagcctcttcaagaaggacaaggccgttctcttcacctacgaccagtatcaggaaaagaatgtggaccaggcctctggctctgtgctcctccatctggaggtgggagaccaagtctggctccaggtgtatggggatggggaccacaatggactctatgcagataacgtcaacgactctacatttactggctttcttctctaccatgataccaacggaagcggagctactaacttcagcctgctgaagcaggctggagacgtggaggagaaccctggacctatgaatcctgcggcagaagccgagttcaacatcctcctggccaccgactcctacaaggttactcactataaacaatatccacccaacacaagcaaagtttattcctactttgaatgccgtgaaaagaagacagaaaactccaaattaaggaaggtgaaatatgaggaaacagtattttatgggttgcagtacattcttaataagtacttaaaaggtaaagtagtaaccaaagagaaaatccaggaagccaaagatgtctacaaagaacatttccaagatgatgtctttaatgaaaagggatggaactacattcttgagaagtatgatgggcatcttccaatagaaataaaagctgttcctgagggctttgtcattcccagaggaaatgttctcttcacggtggaaaacacagatccagagtgttactggcttacaaattggattgagactattcttgttcagtcctggtatccaatcacagtggccacaaattctagagagcagaagaaaatattggccaaatatttgttagaaacttctggtaacttagatggtctggaatacaagttacatgattttggctacagaggagtctcttcccaagagactgctggcataggagcatctgctcacttggttaacttcaaaggaacagatacagtagcaggacttgctctaattaaaaaatattatggaacgaaagatcctgttccaggctattctgttccagcagcagaacacagtaccataacagcttgggggaaagaccatgaaaaagatgcttttgaacatattgtaacacagttttcatcagtgcctgtatctgtggtcagcgatagctatgacatttataatgcgtgtgagaaaatatggggtgaagatctaagacatttaatagtatcaagaagtacacaggcaccactaataatcagacctgattctggaaaccctcttgacactgtgttaaaggttttggagattttaggtaagaagtttcctgttactgagaactcaaagggttacaagttgctgccaccttatcttagagttattcaaggggatggagtagatattaataccttacaagagattgtagaaggcatgaaacaaaaaatgtggagtattgaaaatattgccttcggttctggtggaggtttgctacagaagttgacaagagatctcttgaattgttccttcaagtgtagctatgttgtaactaatggccttgggattaacgtcttcaaggacccagttgctgatcccaacaaaaggtccaaaaagggccgattatctttacataggacgccagcagggaattttgttacactggaggaaggaaaaggagaccttgaggaatatggtcaggatcttctccatactgtcttcaagaatggcaaggtgacaaaaagctattcatttgatgaaataagaaaaaatgcacagctgaatattgaactggaagcagcacatcattagtgactgcaactacccatagcccatacaccaggagaatcatggaacagtcgacacactttcagcttagtttgagagattgattttattgcttagtttgagagtcctgagtattatccacacgtgtactcacttgttcattaaacgactttataaaaaataatttgtgttcctagtccagaaaaaaaggcactccctggtctccacgactcttacatggtagcaataacagaatgaaaatcacatttggtatgggggcttcacaatattcgcatgactgtctggaagtagaccatgctatttttctgctcactgtacacaaatattgttcacataaaccctataatgtaaatatgaaatacagtgattactcttctcacaggctgagtgtatgaatgtctaaagacccataagtattaaagtggtagggataaattggagggcagggtacagtctgttctcattggatggcaccatttttcgaaagcacgtgttcatttagagtgttggcagagatctcattcccacctcatttgtgggtctcagtttacatccattaagacttctcccctgtagagctctctcagagatggtggtcctatgtctaggtcctattctgatattcattggctccctcttcacttcgcacattttcctttccttgcctttgctcacaatcttccttccagctcaggaaatcctacctaccttcacatggaggtggttccctgtccttcaaggccacttgggtaggtgatgttctgatgtgaccttgcagggttgtgggtgtaggggaagagggg

SEQ ID NO: 206 - DNA, 3504 bp, synthetic construct
  source 1..3504: mol_type = other DNA
ccacctcctcctcctcctcctcttccttcttcttgagggagggagttgtaaggaagggaagcagacctgggaagactgaaagtgagtgtgattagggtggtattatatgaaattcccaaataatcaataaaaattaatgcaaaacaagaactcttaatcgtgctgagtcagaattaaaagtcagtaagatacctacacacatgcaaacgtgtgcgtgtgcacacacatccacactcacacacagacactcagacacacacacacacacacacacacacacacactcatataatatatagaagggcttaagcatgcctatcaatgtaagatgaaccaaaaatatcttaaaggttcaaacaatactttcagttgtttttgtggttttggaaacacaaggacattgtgtagaggattatttcacccatggataggcagtgtacgacttaagagccattcatcactcagcctggtcgccgcctttcctcattgggtctcagggtgagtcacatgctttgggtttctttgaaaagagctgtgcaagatctcagcatctcccaggcatctgctgcatcccaccaggaactctactgaactctctcatcatctcccaggcatctgctgcatcccaccaggaactctactgaactctctcatctgtcacaatgaatttactgaccgtacaccaaaatttgcctgcattaccggtcgatgcaacgagtgatgaggttcgcaagaacctgatggacatgttcagggatcgccaggcgttttctgagcatacctggaaaatgcttctgtccgtttgccggtcgtgggcggcatggtgcaagttgaataaccggaaatggtttcccgcagaacctgaagatgttcgcgattatcttctatatcttcaggcgcgcggtctggcagtaaaaactatccagcaacatttgggccagctaaacatgcttcatcgtcggtccgggctgccacgaccaagtgacagcaatgctgtttcactggttatgcggcggatccgaaaagaaaacgttgatgccggtgaacgtgcaaaacaggctctagcgttcgaacgcactgatttcgaccaggttcgttcactcatggaaaatagcgatcgctgccaggatatacgtaatctggcatttctggggattgcttataacaccctgttacgtatagccgaaattgccaggatcagggttaaagatatctcacgtactgacggtgggagaatgttaatccatattggcagaacgaaaacgctggttagcaccgcaggtgtagagaaggcacttagcctgggggtaactaaactggtcgagcgatggatttccgtctctggtgtagctgatgatccgaataactacctgttttgccgggtcagaaaaaatggtgttgccgcgccatctgccaccagccagctatcaactcgcgccctggaagggatttttgaagcaactcatcgattgatttacggcgctaaggatgactctggtcagagatacctggcctggtctggacacagtgcccgtgtcggagccgcgcgagatatggcccgcgctggagtttcaataccggagatcatgcaagctggtggctggaccaatgtaaatattgtcatgaactatatccgtaacctggatagtgaaacaggggcaatggtgcgcctgctggaagatggcgatctcgagccatctgctggagacatgagagctgccaacctttggccaagcccgctcatgatcaaacgctctaagaagaacagcctggccttgtccctgacggccgaccagatggtcagtgccttgttggatgctgagccccccatactctattccgagtatgatcctaccagacccttcagtgaagcttcgatgatgggcttactgaccaacctggcagacagggagctggttcacatgatcaactgggcgaagagggtgccaggctttgtggatttgaccctccatgatcaggtccaccttctagaatgtgcctggctagagatcctgatgattggtctcgtctggcgctccatggagcacccagtgaagctactgtttgctcctaacttgctcttggacaggaaccagggaaaatgtgtagagggcatggtggagatcttcgacatgctgctggctacatcatctcggttccgcatgatgaatctgcagggagaggagtttgtgtgcctcaaatctattattttgcttaattctggagtgtacacatttctgtccagcaccctgaagtctctggaagagaaggaccatatccaccgagtcctggacaagatcacagacactttgatccacctgatggccaaggcaggcctgaccctgcagcagcagcaccagcggctggcccagctcctcctcatcctctcccacatcaggcacatgagtaacaaaggcatggagcatctgtacagcatgaagtgcaagaacgtggtgcccctctatgacctgctgctggaggcggcggacgcccaccgcctacatgcgcccactagccgtggaggggcatccgtggaggagacggaccaaagccacttggccactgcgggctctacttcatcgcattccttgcaaaagtattacatcacgggggaggcagagggtttccctgccacaggaagcggagctactaacttcagcctgctgaagcaggctggagacgtggaggagaaccctggacctgctagcaacaaattcctaggcacctggaagcttgtctccagtgagcacttcgatgactacatgaaagctctaggtgagaagtgctttatgacaaatgtcccttgaaagacagatacacagggttttcttccaatattccccctcccccgagtctggggaatgtttcgtgggctgagtgcaatcttctgtctcattcataaaatttacttccatttcactggcaataaataaattagaacttacacaaagctatttaaatgcatggaacttgaagacagttttgcaggtttgccgttggaaatttggggaaaactattagaatttgagtcaatccatattctggcattttctgaaagcttgtttaatagaaattaatgtggtcataagattatgagttgaatactagaaagccacaatttaaaattttaacctttatccaaactaaaaattttgtctctgctttgagtttgtctgtaattaaatgatcatctaagtgtgtgaagcttgacagataacacatttcctagatgaggaagcttgaaaactgtggaagttgttgagatcaaaagagctagttggatgctgtgagttcaaactccgtcccaccaatgcctgcccatcctagtgttgagcagggactacagacaagagtgtggtggagactttgttctgttttgttcttcttaccaggcatagtatgaactacagaatgtcaaaaatatgattctaccaaggaaatggggggagggggtgttctgtatatccgtagctacttatggacagagaacgtgttatagcaagg

SEQ ID NO: 207 - DNA, 3909 bp, synthetic construct
  source 1..3909: mol_type = other DNA
cttgccattggctcgtgttcgtgcaagttgagtccatccgccggccagcgggggcggcgaggaggcgctcccaggttccggccctcccctcggccccgcgccgcagagtctggccgcgcgcccctgcgcaacgtggcaggaagcgcgcgctgggggcggggacgggcagtagggctgagcggctgcggggcgggtgcaagcacgtttccgacttgagttgcctcaagaggggcgtgctgagccagacctccatcgcgcactccggggagtggagggaaggagcgagggctcagttgggctgttttggaggcaggaagcacttgctctcccaaagtcgctctgagttgttatcagtaagggagctgcagtggagtaggcggggagaaggccgcacccttctccggaggggggaggggagtgttgcaatacctttctgggagttctctgctgcctcctggcttctgaggaccgccccgggcccgggagaatcccttccccctcttccctcgtgatctgcaactccagtctttctagaagatgggcgggagtcgaattccatagagcccaccgcatccccagcatgcctgctattgtcttcccaatcctcccccttgctgtcctgccccaccccaccccccagaatagaatgacacctactcagacaatgcgatgcaatttcctcattttattaggaaaggacagtgggagtggcaccttccggggtcaaggaaggcacgggggaggggcaaacaacagatggctggcaactagaaggcacagtcaggcgtagtcaggcacgtcgtaaggatagtttccctgattctggagaatggcccgcagcctcccactcagggcttggctgtgctcatctagtccatcccagggctggaagggacatccctggtggtccacaaaggtgtcccagcagtgcttaaattcatcgtaggtcatgatggagacttgggccccagcatcccgcagcatttgcagtgcctccttatatagggggtcgtaatcatagatgcgggcagcgaagatacgcagtctcacgtgtgtgttctcctgaaggaacgcacgcacttccccggcacagccccaggagaagcaggggctccaggagatgaaccaagtgaccctgtagatctgggccgggtccaactgcaaagaaggaaccaggtccaagaagcgcagctccgcatggcggccgtaaaagccacagagaagattcttagcctggttgtgtagaaagcccctgtgctggtccatcttgaccgaggtgccattgtccaggcgctccacttcgtagcacaggtaggtcttatgccttccaatgccattgttaaagttggaagtgaatatgtgtggatccatcaagtgtctgggcccggatgctgggctggcttccatggtggcgaccgataacttcgtatagcatacattatacgaagttatattaagggttccggatcagcttgatggggatccagacatgataagatacattgatgagtttggacaaaccacaactagaatgcagtgaaaaaaatgctttatttgtgaaatttgtgatgctattgctttatttgtaaccattataagctgcaataaacaagttaacaacaacaattgcattcattttatgtttcaggttcagggggaggtgtgggaggttttttaaagcaagtaaaacctctacaaatgtggtatggctgattatgatcctctagagtcgcagatccagacatgataagatacattgatgagtttggacaaaccacaactagaatgcagtgaaaaaaatgctttatttgtgaaatttgtgatgctattgctttatttgtaaccattataagctgcaataaacaagttaacaacaacaattgcattcattttatgtttcaggttcagggggaggtgtgggaggttttttaaagcaagtaaaacctctacaaatgtggtatggctgattatgatcctctagagtcgcagatccagacatgataagatacattgatgagtttggacaaaccacaactagaatgcagtgaaaaaaatgctttatttgtgaaatttgtgatgctattgctttatttgtaaccattataagctgcaataaacaagttaacaacaacaattgcattcattttatgtttcaggttcagggggaggtgtgggaggttttttaaagcaagtaaaacctctacaaaatgtggtatggctgattatgatcctctagagtcgcagatcctctagagtcgcagatctgcaagctttcatttattcatcgcgaaataacttcgtatagcatacattatacgaagttatgtccaagctctgcttatataggcctcccaccgtacacgcctactcgacccgggtaccgagctcgactttcacttttctctatcactgatagggagtggtaaactcgactttcacttttctctatcactgatagggagtggtaaactcgactttcacttttctctatcactgatagggagtggtaaactcgactttcacttttctctatcactgatagggagtggtaaactcgactttcacttttctctatcactgatagggagtggtaaactcgactttcacttttctctatcactgatagggagtggtaaactcgactttcacttttctctatcactgatagggaggacagtgccaagcaagcaactcaaatgtcccaccggttgggcatggccaggtagcctatgctgtgtctggacgtcctcctgctggtatagttattttaaaatcagaaggacagggaagggagcagtggttcacgcctgtaatcccagcaatttgggaggccaaggtgggtagatcacctgagattaggagttggagaccagcctggccaatatggtgaaaccccgtctctaccaaaaaaacaaaaattagctgagcccggtcatgcatgcctggaatcccaacaactcgggaggctgaggcaggagaatcgcttgaacccaggaggcggagattgcagtgagccaagattgtgccactgcactccagcttggttcccaatagaccccgcaggccctacaggttgtcttcccaacttgccccttgctccataccacccccctccaccccataatattatagaaggacacctagtcagacaaaatgatgcaacttaattttattaggacaaggctggtgggcactggagtggcaacttccggggccaggagaggcactggggaggggtcacagggatgccacccgggttctgggcaggcttaaaggctaacctggtgtgtgggcgttgtcctgcaggggaattgaacaggtgtaaaattggagggacaagacttcccacagattttcggttttgtcgggaagttttttaataggggcaaataaggaaaatgggaggataggtagtcatctggggttttatgcagcaaaactacaggttattattgcttgtgatccgcctcggagtattttccatcgaggtagattaaagacatgctcacccgagttttatactctcctgcttgagatccttactacagtatgaaattacagtgtcgcgagttagactatgtaagcagaattttaatcatttttaaagagcccagtacttcatatccatttctcccgctccttctgcagccttatcaaaaggtattttagaacactcattttagccccattttcatttattatactggcttatccaacccctagacagagcattggcattttccctttcctgatcttagaagtctgatgactcatgaaaccagacagattagttacatacaccacaaatcgaggctgtagctggggcctcaacactgcagttcttttataactccttagtacactttttgttgatcctttgccttgatccttaattttcagtgtctatca

SEQ ID NO: 208 - DNA, 2474 bp, synthetic construct
  source 1..2474: mol_type = other DNA
gtgttgtattttgccctttgattattgctcacctaggagcagtagtcaagagaaagtagtaatctatttcttgtttccccaggcagctacctcactgttggggttatatcactaacttgtgaagacttcagtaccgtatttaagtgtggcccttgtgtgtttgacgttaatgtctgagtccccacccccacccccacccccctttggttgggagcagttgtaccaaagagtatgtgaagtttcagtttggaatcatgatagcataaagtttatagggccataagtgcagagaactgtaatgctcagtctcttcttatcaggtctatggtgactcagggaaccttagcacttcgtaactacccaggacaaggacagcgtagttagtgccaagcaggacgagagtgcccagcatgttggcctgggatcccagccttgcctcgtgcctagttcttgcttcagtctatgcatctgccgaagcaagggcaggactttgttaaattcggtataatttgaactacaggcacactgagccttttagtctgttcttattttgaaagccgttcaggaaggacagacgtgcgcttcctcacaaacatccctctcttttgcagatttgctgactttgtggaaggttctttccacctcacgccaaatgaagtttctgttcacgaacaggagtatggattagggagcatctttacccaggatgaggagctgtcctcagaagaggagggctcagagtacccgacattcactcagaataacttcttgactggaagcggaatggcagaaatcggtactggctttccattcgacccccattatgtggaagtcctgggcgagcgcatgcactacgtcgatgttggtccgcgcgatggcacccctgtgctgttcctgcacggtaacccgacctcctcctacgtgtggcgcaacatcatcccgcatgttgcaccgacccatcgctgcattgctccagacctgatcggtatgggcaaatccgacaaaccagacctgggttatttcttcgacgaccacgtccgcttcatggatgccttcatcgaagccctgggtctggaagaggtcgtcctggtcattcacgactggggctccgctctgggtttccactgggccaagcgcaatccagagcgcgtcaaaggtattgcatttatggagttcatccgccctatcccgacctgggacgaatggccagaatttgcccgcgagaccttccaggccttccgcaccaccgacgtcggccgcaagctgatcatcgatcagaacgtttttatcgagggtacgctgccgatgggtgtcgtccgcccgctgactgaagtcgagatggaccattaccgcgagccgttcctgaatcctgttgaccgcgagccactgtggcgcttcccaaacgagctgccaatcgccggtgagccagcgaacatcgtcgcgctggtcgaagaatacatggactggctgcaccagtcccctgtcccgaagctgctgttctggggcaccccaggcgttctgatcccaccggccgaagccgctcgcctggccaaaagcctgcctaactgcaaggctgtggacatcggcccgggtctgaatctgctgcaagaagacaacccggacctgatcggcagcgagatcgcgcgctggctgtcgacgctcgagatttccggctaaatagcagtctgttgttttcatatagactggcatggtaccttggtgtggccacattgtaagtgctgtgtgattctcccaggcttttataagagcctggagcgggtgcaggagttctgctggaatgaggggctgagtgggttaccctctggcagtacttttggtgtgtacctcaggctggtcctcttcgaggaaagagtggcggaggcactgagggctgcggcagctcgcttctgacatttgagcacttggcccactttgcggttcctgaagtcattgtttgcccacaacagtctagctcctgtttaaaagtttgctgagttctggcaactctgtcactgtgacagacccttaaaaatgagtattaagtgcagtaatgcattcaaatggaggctgcatcttttaaagagaatctataagtctgagccattttttacttctgtctgctctatttcactggatccttataataatcctgaatgatttaaatattgaagaaaaaatagattgttacctatcttgttttttaaacaaatatatttttttaagtgcaagaaagtcatgttctttacccaataagtgctccagagtacaaaccctactgaccccagatatttattacctgtgaaacccctggagctgctgctgttgagccttgaatgctcacagtctgatttttagtttgcttgcatttaggagaacgtctgctgcccttctgtaggtttggtttcctaagctttttattatatttgatattggctttttttcttgccgtttctcaccattgacttttcccactc

SEQ ID NO: 209 - DNA, 2402 bp, synthetic construct
  source 1..2402: mol_type = other DNA
tgggggaggagacatccacctggaaaccattaatggttaatagctcagtttataaatggagaaaaaggagagaggcattcatgggagtggaaagttaagctttaggttggattctcaatacatctattgttgtaaaactccctggactgagaataggcccaaatgtggaacaccacctgacgggagaggtgatagacactgaaaattaaggatcaaggcaaaggatcaacaaaaagtgtactaaggagttataaaagaactgcagtgttgaggccccagctacagcctcgatttgtggtgtatgtaactaatctgtctggtttcatgagtcatcagacttctaagatcaggaaagggaaaatgccaatgctctgtctaggggttggataagccagtataataaatgaaaatggggctaaaatgagtgttctaaaataccttttgataaggctgcagaaggagcgggagaaatggatatgaagtactgggctctttaaaaatgattaaaattctgcttacatagtctaactcgcgacactgtgaattatagagcccaccgcatccccagcatgcctgctattgtcttcccaatcctcccccttgctgtcctgccccaccccaccccccagaatagaatgacacctactcagacaatgcgatgcaatttcctcattttattaggaaaggacagtgggagtggcaccttccagggtcaaggaaggcacgggggaggggcaaacaacagatggctggcaactagaaggcacagtcgaggctgatcagcggtttaaacttaagctacttgtacagctcgtccatgtcgtgggtgatgccggcggcggtcaccctctccttcagcaccatgtggtccctcttctcgttggggtccttgctcagcttgctctggtggctcaggtagtggttgtcgggcagcagcacggggccgtcgccgatgggggtgttctgctggtagtggtcggccagctgcacgccgccgtcctccacgttgtgcctggtcttgaagttggccttgatgccgttcttctgcttgtcggcggtgatgtacaccttgtggctgttgaagttgtactccagcttgtggcccaggatgttgccgtcctccttgaagtcgatgcccttcagcacgatcctgttcaccagggtgtcgccctcgaacttcacctcggccctggtcttgtaggtgccgtcgtccttgaagctgatggtcctctcctgcacgtagccctcgggcatggcgctcttgaagaagtcgtgctgcttcatgtggtcggggtatctggcgaagcaggccacgccgtagcccagggtggtcaccagggtgggccagggcacgggcagcttgccggtggtgcagatgaacttcagggtcagcttgccgttggtggcgtcgccctcgccctcgcccctcacgctgaacttgtggccgttcacgtcgccgtccagctccaccaggatgggcaccacgccggtgaacagctcctcgcccttgctcaccatgatcttttggtcctcatcattcttttcaacctgtttggttcttctcatacagcacagcatggtggcggatccactcgagtctagaaattcgatctagcttgggctgcaggtcgagggacctaataacttcgtatagcatacattatacgaagttatattaagggttccggatcagcttgatggggatccagacatgataagatacattgatgagtttggacaaaccacaactagaatgcagtgaaaaaaatgctttatttgtgaaatttgtgatgctattgctttatttgtaaccattataagctgcaataaacaagttaacaacaacaattgcattcattttatgtttcaggttcagggggaggtgtgggaggttttttaaagcaagtaaaacctctacaaatgtggtatggctgattatgatcctctagagtcgcagatccagacatgataagatacattgatgagtttggacaaaccacaactagaatgcagtgaaaaaaatgctttatttgtgaaatttgtgatgctattgctttatttgtaaccattataagctgcaataaacaagttaacaacaacaattgcattcattttatgtttcaggttcagggggaggtgtgggaggttttttaaagcaagtaaaacctctacaaatgtggtatggctgattatgatcctctagagtcgcagatccagacatgataagatacattgatgagtttggacaaaccacaactagaatgcagtgaaaaaaatgctttatttgtgaaatttgtgatgctattgctttatttgtaaccattataagctgcaataaacaagttaacaacaacaattgcattcattttatgtttcaggttcagggggaggtgtgggaggtt

SEQ ID NO: 210 - DNA, 4817 bp, synthetic construct
  source 1..4817: mol_type = other DNA
acggcagccggagtgcgcagccgccggcagcctcgctctgcccactgggtggggcgggaggtaggtggggtgaggcgagctggacgtgcgggcgcggtcggcctctggcggggcgggggaggggagggagggtcagcgaaagtagctcgcgcgcgagcggccgcccaccctccccttcctctgggggagtcgttttacccgccgccggccgggcctcgtcgtctgattggctctcggggcccagaaaactggcccttgccattggctcgtgttcgtgcaagttgagtccatccgccggccagcgggggcggcgaggaggcgctcccaggttccggccctcccctcggccccgcgccgcagagtctggccgcgcgcccctgcgcaacgtggcaggaagcgcgcgctgggggcggggacgggcagtagggctgagcggctgcggggcgggtgcaagcacgtttccgacttgagttgcctcaagaggggcgtgctgagccagacctccatcgcgcactccggggagtggagggaaggagcgagggctcagttgggctgttttggaggcaggaagcacttgctctcccaaagtcgctctgagttgttatcagtaagggagctgcagtggagtaggcggggagaaggccgcacccttctccggaggggggaggggagtgttgcaatacctttctgggagttctctgctgcctcctggcttctgaggaccgccctgggcctgggagaatcccttccccctcttccctcgtgatctgcaactccagtctttctagaagatgggcgggatagagcccaccgcatccccagcatgcctgctattgtcttcccaatcctcccccttgctgtcctgccccaccccaccccccagaatagaatgacacctactcagacaatgcgatgcaatttcctcattttattaggaaaggacagtgggagtggcaccttccagggtcaaggaaggcacgggggaggggcaaacaacagatggctggcaactagaaggcacagtcgaggttatcaagctgtggcagggaaaccctctgcctcccccgtgatgtaatacttttgcaaggaatgcgatgaagtagagcccgcagtggccaagtggctttggtccgtctcctccacggatgcccctccacggctagtgggcgcatgtaggcggtgggcgtccgccgcctccagcagcaggtcatagaggggcaccacgttcttgcacttcatgctgtacagatgctccatgcctttgttactcatgtgcctgatgtgggagaggatgaggaggagctgggccagccgctggtgctgctgctgcagggtcaggcctgccttggccatcaggtggatcaaagtgtctgtgatcttgtccaggactcggtggatatggtccttctcttccagagacttcagggtgctggacagaaatgtgtacactccagaattaagcaaaataatagatttgaggcacacaaactcctctccctgcagattcatcatgcggaaccgagatgatgtagccagcagcatgtcgaagatctccaccatgccctctacacattttccctggttcctgtccaagagcaagttaggagcaaacagtagcttcactgggtgctccatggagcgccagacgagaccaatcatcaggatctctagccaggcacattctagaaggtggacctgatcatggagggtcaaatccacaaagcctggcaccctcttcgcccagttgatcatgtgaaccagctccctgtctgccaggttggtcagtaagcccatcatcgaagcttcactgaagggtctggtaggatcatactcggaatagagtatggggggctcagcatccaacaaggcactgaccatctggtcggccgtcagggacaaggccaggctgttcttcttagagcgtttgatcatgagcgggcttggccaaaggttggcagctctcatgtctccagcagatggctcgagatcgccatcttccagcaggcgcaccattgcccctgtttcactatccaggttacggatatagttcatgacaatatttacattggtccagccaccagcttgcatgatctccggtattgaaactccagcgcgggccatatctcgcgcggctccgacacgggcactgtgtccagaccaggccaggtatctctgaccagagtcatccttagcgccgtaaatcaatcgatgagttgcttcaaaaatcccttccagggcgcgagttgatagctggctggtggcagatggcgcggcaacaccattttttctgacccggcaaaacaggtagttattcggatcatcagctacaccagagacggaaatccatcgctcgaccagtttagttacccccaggctaagtgccttctctacacctgcggtgctaaccagcgttttcgttctgccaatatggattaacattctcccaccgtcagtacgtgagatatctttaaccctgatcctggcaatttcggctatacgtaacagggtgttataagcaatccccagaaatgccagattacgtatatcctggcagcgatcgctattttccatgagtgaacgaacctggtcgaaatcagtgcgttcgaacgctagagcctgttttgcacgttcaccggcatcaacgttttcttttcggatccgccgcataaccagtgaaacagcattgctgtcacttggtcgtggcagcccggaccgacgatgaagcatgtttagctggcccaaatgttgctggatagtttttactgccagaccgcgcgcctgaagatatagaagataatcgcgaacatcttcaggttctgcgggaaaccatttccggttattcaacttgcaccatgccgcccacgaccggcaaacggacagaagcattttccaggtatgctcagaaaacgcctggcgatccctgaacatgtccatcaggttcttgcgaacctcatcactcgttgcatcgaccggtaatgcaggcaaattttggtgtacggtcagtaaattggacataggtccagggttctcctccacgtctccagcctgcttcagcaggctgaagttagtagctccgcttcccttgtacagctcgtccatgccgtgagtgatcccggcggcggtcacgaactccagcaggaccatgtgatcgcgcttctcgttggggtctttgctcagggcggactgggtgctcaggtagtggttgtcgggcagcagcacggggccgtcgccgatgggggtgttctgctggtagtggtcggcgagctgcacgctgccgtcctcgatgttgtggcggatcttgaagttcaccttgatgccgttcttctgcttgtcggccatgatatagacgttgtggctgttgtagttgtactccagcttgtgccccaggatgttgccgtcctccttgaagtcgatgcccttcagctcgatgcggttcaccagggtgtcgccctcgaacttcacctcggcgcgggtcttgtagttgccgtcgtccttgaagaagatggtgcgctcctggacgtagccttcgggcatggcggacttgaagaagtcgtgctgcttcatgtggtcggggtagcggctgaagcactgcacgccgtaggtcagggtggtcacgagggtgggccagggcacgggcagcttgccggtggtgcagatgaacttcagggtcagcttgccgtaggtggcatcgccctcgccctcgccggacacgctgaacttgtggccgttcacgtcgccgtccagctcgaccaggatgggcaccaccccggtgaacagctcctcgcccttgctcaccatggtggcggctcagaattgctagttggcccccattatataccctctagagcatatggattaatcgccatacgtgcagagacgcacgtactcaaggtcttaatcgccatacgtgcagagacgcacgtactcaaggtcttaatcgccatacgtgcagagacgcacgtactcaaggtcttaatcgccatacgtgcagagacgcacgtactcaaggtcttaattggcttaaaggctaacctggtgtgtgggcgttgtcctgcaggggaattgaacaggtgtaaaattggagggacaagacttcccacagattttcggttttgtcgggaagttttttaataggggcaaataaggaaaatgggaggataggtagtcatctggggttttatgcagcaaaactacaggttattattgcttgtgatccgcctcggagtattttccatcgaggtagattaaagacatgctcacccgagttttatactctcctgcttgagatccttactacagtatgaaattacagtgtcgcgagttagactatgtaagcagaattttaatcatttttaaagagcccagtacttcatatccatttctcccgctccttctgcagccttatcaaaaggtattttagaacactcattttagccccattttcatttattatactggcttatccaacccctagacagagcattggcattttccctttcctgatcttagaagtctgatgactcatgaaaccagacagattagttacatacaccacaaatcgaggctgtagctggggcctcaacactgcagttcttttataactccttagtacactttttgttgatcctttgccttgatccttaattttcagtgtctatcacctctcccgtcaggtggtgttccacatttgggcctattctcagtccagggagttttacaacaatagatgtattgagaatccaacctaaagcttaactttccactcccatgaatgcctctctcctttttctccatttataaactgagctattaaccat

SEQ ID NO: 211 - DNA, 3503 bp, synthetic construct
  source 1..3503: mol_type = other DNA
ctgactttctagggaccaacattttaaaaggcccctaggttatgtgagaggaaagaagagcattcggactcctgggtcttcgaggtggggaggctaatgtggctcaagctgtcaggagttcctgaaactggttcttgggtctctactatggagggatccaaactcacagactcccgatgaggaacagagctggactcctgggtcctaaatcgcgagaacctgaaccttttggccttcaaagtgaaggctccccgactcttaggttcgtcgcagtgttttgggtctgagaagcctggcgttcacctctctctctctctctctctctctctctctctctctctgtcaggtcccattcagctgtggcaattcctcctggagctgctccacgacggggctcgcagcagctgcatccgctggacgggcaatagccgcgagttccagctgtgcgaccccaaagaggtgagacagctccccttgctgggcaagcccaacttacctagttcccagccccgcctccacccactcacaaccccccacgcccatcaggactgagacccgccccgcccatagcagctaagaccctggtccctctaacctcaagattgtttcctaggtggcccggctgtggggcgagcgcaagaggaagccgggaatgaattatgagaaactgagtcgaggtctacgttattattaccgccgcgacatcgtgctcaagagtggtgggcgcaagtacacataccgcttcgggggacgtgtgcctgtcctcgcctatcaggatgatatggggcatctgccaggagctgagggacaaggagggtccggaggcgctactaacttcagcctgctgaagcaggctggagacgtggaggagaaccctggacctcccaagaagaagcgcaaggtgaatttactgaccgtacaccaaaatttgcctgcattaccggtcgatgcaacgagtgatgaggttcgcaagaacctgatggacatgttcagggatcgccaggcgttttctgagcatacctggaaaatgcttctgtccgtttgccggtcgtgggcggcatggtgcaagttgaataaccggaaatggtttcccgcagaacctgaagatgttcgcgattatcttctatatcttcaggcgcgcggtctggcagtaaaaactatccagcaacatttgggccagctaaacatgcttcatcgtcggtccgggctgccacgaccaagtgacagcaatgctgtttcactggttatgcggcggatccgaaaagaaaacgttgatgccggtgaacgtgcaaaacaggctctagcgttcgaacgcactgatttcgaccaggttcgttcactcatggaaaatagcgatcgctgccaggatatacgtaatctggcatttctggggattgcttataacaccctgttacgtatagccgaaattgccaggatcagggttaaagatatctcacgtactgacggtgggagaatgttaatccatattggcagaacgaaaacgctggttagcaccgcaggtgtagagaaggcacttagcctgggggtaactaaactggtcgagcgatggatttccgtctctggtgtagctgatgatccgaataactacctgttttgccgggtcagaaaaaatggtgttgccgcgccatctgccaccagccagctatcaactcgcgccctggaagggatttttgaagcaactcatcgattgatttacggcgctaaggatgactctggtcagagatacctggcctggtctggacacagtgcccgtgtcggagccgcgcgagatatggcccgcgctggagtttcaataccggagatcatgcaagctggtggctggaccaatgtaaatattgtcatgaactatatccgtaacctggatagtgaaacaggggcaatggtgcgcctgctggaagatggcgatggcggtagtggaggagagggcagaggaagtcttctaacatgcggtgacgtggaggagaatcccggccctatggtgagcaagggcgaggaggataacatggccatcatcaaggagttcatgcgcttcaaggtgcacatggagggctccgtgaacggccacgagttcgagatcgagggcgagggcgagggccgcccctacgagggcacccagaccgccaagctgaaggtgaccaagggtggccccctgcccttcgcctgggacatcctgtcccctcagttcatgtacggctccaaggcctacgtgaagcaccccgccgacatccccgactacttgaagctgtccttccccgagggcttcaagtgggagcgcgtgatgaacttcgaggacggcggcgtggtgaccgtgacccaggactcctccctgcaggacggcgagttcatctacaaggtgaagctgcgcggcaccaacttcccctccgacggccccgtaatgcagaagaagaccatgggctgggaggcctcctccgagcggatgtaccccgaggacggcgccctgaagggcgagatcaagcagaggctgaagctgaaggacggcggccactacgacgctgaggtcaagaccacctacaaggccaagaagcccgtgcagctgcccggcgcctacaacgtcaacatcaagttggacaccacctcccacaacgaggactacaccatcgtggaacagtacgaacgcgccgagggccgccactccaccggcggcatggacgagctgtacaagtaaaacaaaaaacaaaaacaaccctgtcgaacctgcgtgtctggtgtctgtttctttttcactgatacctactcgacctgtcaagggagcctaaatgtgcaccccgacatttcatgctccagccatattgaggtatccggacccctgtctgtttttgatcgagtgtttccctcccgtggtccctagactgaacgtcatagctccttagtccttagtttcaagacgaccatcaaggccatttcactatgagtgatgatgcaggtcactaatttcacagcattcaggagactgaggcaagagaatcgtaaaattaggggctccagacctaccagaactacaaactagtccttagttctaagaggacccaggagggaggaccagacccgcccccttccaataggaacctgtaaactacaaagcccttgctccctccctgccagttttccccagcccttccttgccttaggaatctaggtcccaccacttcccactgcctttgctctctctgcatcttctgcacctctcaccttggttagtttgaggtaagtagtctgtagggtttattgtgtgccagtaggaactttttaaagaaattggacttctttaaagatttgtatattttatacatgtgactacacagtcactgtcatccctcttttcagacacaccagtagagggcatcagatcccattacagatggttgtgagccaccattgtggttgcagggaattgaactcaggaccactggaagaggtccagtgctcttaagtgctaagccatctctccagccccaaaactg

SEQ ID NO: 212 - DNA, 3506 bp, synthetic construct
  source 1..3506: mol_type = other DNA
ctgactttctagggaccaacattttaaaaggcccctaggttatgtgagaggaaagaagagcattcggactcctgggtcttcgaggtggggaggctaatgtggctcaagctgtcaggagttcctgaaactggttcttgggtctctactatggagggatccaaactcacagactcccgatgaggaacagagctggactcctgggtcctaaatcgcgagaacctgaaccttttggccttcaaagtgaaggctccccgactcttaggttcgtcgcagtgttttgggtctgagaagcctggcgttcacctctctctctctctctctctctctctctctctctctctgtcaggtcccattcagctgtggcaattcctcctggagctgctccacgacggggctcgcagcagctgcatccgctggacgggcaatagccgcgagttccagctgtgcgaccccaaagaggtgagacagctccccttgctgggcaagcccaacttacctagttcccagccccgcctccacccactcacaaccccccacgcccatcaggactgagacccgccccgcccatagcagctaagaccctggtccctctaacctcaagattgtttcctaggtggcccggctgtggggcgagcgcaagaggaagccgggaatgaattatgagaaactgagtcgaggtctacgttattattaccgccgcgacatcgtgctcaagagtggtgggcgcaagtacacataccgcttcgggggacgtgtgcctgtcctcgcctatcaggatgatatggggcatctgccaggagctgagggacaaggagggtccggaggcgctactaacttcagcctgctgaagcaggctggagacgtggaggagaaccctggacctcccaagaagaagcgcaaggtgtctgagctgattattagtggttcatctggtggattcctgcgaaacatcggcaaagagtatcaggaggccgctgaaaacttcatgaggtttatgaatgaccagggggcgtacgctcctaacactttgagggatttgaggttggtctttcatagctgggccagatggtgccatgctcggcagcttgcatggtttccaattagtcctgaaatggcacgcgaatactttcttcagttgcacgatgcagacctggcctccactaccatcgacaagcactatgctatgcttaatatgcttctgtcccactgcggactgccacccttgtccgacgacaagtcagtgagtcttgccatgagaagaattagaagagaagccgcaaccgaaaagggtgagaggacaggacaggcaatccccctgcgctgggacgacctgaagctgctggatgtgctgctcagcaggagcgagcggctggtcgacctgcgcaacagggctttcctgttcgtagcctataacaccctcatgagaatgtctgaaatatcacgcatcagggttggggacttggatcagacaggagacacagtgaccctgcacatcagtcacactaagacaatcaccacagctgcgggccttgacaaagtgctctcccggcgaaccacagcagtgctcaatgactggctggacgtcagtgggcttagagaacatccagacgctgtgctcttcccacctatacaccggtcaaacaaagcccgcattactaccacgcccctgaccgcccctgccatggagaagattttcagtgatgcctgggtgctgctgaacaaacgggacgccacccccaataaagggaggtataggacctggaccggccattccgccagggtgggtgccgcaatagacatggccgagaaacaggtgtctatggtcgagattatgcaggaagggacatggaagaagcctgaaacactgatgcggtatctcagaaggggcggagtgtccgtgggagccaattctcgactgatggatagctaaggcggtagtggaggagagggcagaggaagtcttctaacatgcggtgacgtggaggagaatcccggccctatggtgagcaagggcgaggaggataacatggccatcatcaaggagttcatgcgcttcaaggtgcacatggagggctccgtgaacggccacgagttcgagatcgagggcgagggcgagggccgcccctacgagggcacccagaccgccaagctgaaggtgaccaagggtggccccctgcccttcgcctgggacatcctgtcccctcagttcatgtacggctccaaggcctacgtgaagcaccccgccgacatccccgactacttgaagctgtccttccccgagggcttcaagtgggagcgcgtgatgaacttcgaggacggcggcgtggtgaccgtgacccaggactcctccctgcaggacggcgagttcatctacaaggtgaagctgcgcggcaccaacttcccctccgacggccccgtaatgcagaagaagaccatgggctgggaggcctcctccgagcggatgtaccccgaggacggcgccctgaagggcgagatcaagcagaggctgaagctgaaggacggcggccactacgacgctgaggtcaagaccacctacaaggccaagaagcccgtgcagctgcccggcgcctacaacgtcaacatcaagttggacaccacctcccacaacgaggactacaccatcgtggaacagtacgaacgcgccgagggccgccactccaccggcggcatggacgagctgtacaagtaaaacaaaaaacaaaaacaaccctgtcgaacctgcgtgtctggtgtctgtttctttttcactgatacctactcgacctgtcaagggagcctaaatgtgcaccccgacatttcatgctccagccatattgaggtatccggacccctgtctgtttttgatcgagtgtttccctcccgtggtccctagactgaacgtcatagctccttagtccttagtttcaagacgaccatcaaggccatttcactatgagtgatgatgcaggtcactaatttcacagcattcaggagactgaggcaagagaatcgtaaaattaggggctccagacctaccagaactacaaactagtccttagttctaagaggacccaggagggaggaccagacccgcccccttccaataggaacctgtaaactacaaagcccttgctccctccctgccagttttccccagcccttccttgccttaggaatctaggtcccaccacttcccactgcctttgctctctctgcatcttctgcacctctcaccttggttagtttgaggtaagtagtctgtagggtttattgtgtgccagtaggaactttttaaagaaattggacttctttaaagatttgtatattttatacatgtgactacacagtcactgtcatccctcttttcagacacaccagtagagggcatcagatcccattacagatggttgtgagccaccattgtggttgcagggaattgaactcaggaccactggaagaggtccagtgctcttaagtgctaagccatctctccagccccaaaactg

SEQ ID NO: 213 - DNA, 2825 bp, synthetic construct
  source 1..2825: mol_type = other DNA
gaccataagcaatagccataagcagaacctctgcagctgtataaatccaaaagtttggaaatttttcgggtctaattctgtgtctgtctgctgtgaattcttgctctgtatggggttggtggtggtgtttatttttatttatttattattttattttggtttttcaagataaggtttcttcatatagccctggctgtcctggaactccctctgtaaaccaggctggcttcaaactcagagatccacctgcctctgccttctgagtcttgggattaaaggcgtgcaccagcactgcctggctttattttaaaggatatttcatcaaatgagagggatggagactgcaagctaggttgtttaacctagtttttcagtttgggtgagaaagcaactttgtctactatgggcagctttattttatctgaatattttagctgttgtatgcagaaatctgtcttgaacttcaagtccattatggttctagaagttcttcagatgtcttgcccagggacagggctggtgcccacctgtcatttgctgtttgagtgggtcatgacctcatacctccttagcacatctgtgctgcagagcctgtgatgatgatgcctgctgttatcatttgtctccactctgtcctggcttggcagcctgggtgctgggtggatgctgaccctctgcatgtccatgactgccatttaccttgactcatttcacagcaaatggttttatgtgtgggtgactgttctcttcttctccccacagagtctatagaagacacagcagcaagactcccagatgcccaagaagaagaggaaggtaccatggaatttactgaccgtacaccaaaatttgcctgcattaccggtcgatgcaacgagtgatgaggttcgcaagaacctgatggacatgttcagggatcgccaggcgttttctgagcatacctggaaaatgcttctgtccgtttgccggtcgtgggcggcatggtgcaagttgaataaccggaaatggtttcccgcagaacctgaagatgttcgcgattatcttctatatcttcaggcgcgcggtctggcagtaaaaactatccagcaacatttgggccagctaaacatgcttcatcgtcggtccgggctgccacgaccaagtgacagcaatgctgtttcactggttatgcggcggatccgaaaagaaaacgttgatgccggtgaacgtgcaaaacaggctctagcgttcgaacgcactgatttcgaccaggttcgttcactcatggaaaatagcgatcgctgccaggatatacgtaatctggcatttctggggattgcttataacaccctgttacgtatagccgaaattgccaggatcagggttaaagatatctcacgtactgacggtgggagaatgttaatccatattggcagaacgaaaacgctggttagcaccgcaggtgtagagaaggcacttagcctgggggtaactaaactggtcgagcgatggatttccgtctctggtgtagctgatgatccgaataactacctgttttgccgggtcagaaaaaatggtgttgccgcgccatctgccaccagccagctatcaactcgcgccctggaagggatttttgaagcaactcatcgattgatttacggcgctaaggatgactctggtcagagatacctggcctggtctggacacagtgcccgtgtcggagccgcgcgagatatggcccgcgctggagtttcaataccggagatcatgcaagctggtggctggaccaatgtaaatattgtcatgaactatatccgtaacctggatagtgaaacaggggcaatggtgcgcctgctggaagatggcgattagtaaaatctagaactatagtgagtcgtattacgtagatccagacatgataagatacattgatgagtttggacaaaccacaactagaatgcagtgaaaaaaatgctttatttgtgaaatttgtgatgctattgctttatttgtaaccattataagctgcaataaacaagttaacaagatatggaaatcacttctcactaccggcatctgcttcgagagctcaatgagcagaggcagcacggagtcctctgtgatgcgtgcgtcgtggtggagggcaaggtcttcaaggcacataagaacgtcttgcttgggagcagccgctactttaagacgctctactgccaggtacagaagacatctgaccaggccaccgtcactcacttggacattgttacagcccagggcttcaaggccattattgacttcatgtactccgcccatctggctctcactagtaggaatgtcatcgaggtgatgtcagctgccagcttcctacagatgactgacattgtgcaggcctgccatgatttcatcaaggctgcactggacatcagcataaagtcagatgcctccgatgaactctcagaatttgagattggcaccccagccagcaacagtacagaggcgttgatctcagctgtgatggctggaaggagtatctccccatggttggctcggagaacaagtcctgccaattcttctggagactctgccattgccagctgtcatgaaggaggaagcagctatgggaaggaggaccaggaacccaaagctgatggccctgatgacgtttcttcacagtctttgtggcctggagatgtaggctatgggtctctgcgcatcaaggaagaacagatttcaccatcacattatggagggagtgagcttccatcttccaaggacactgcaatacagaattctttatcagaacagggttctggggatggctggcagcccacaggccggaggaagaatcg

SEQ ID NO: 214 - DNA, 4291 bp, synthetic construct
  source 1..4291: mol_type = other DNA
cagccaggagtgcgcagccgccggcagcctcgctctgcccactgggtggggcgggaggtaggtggggtgaggcgagctggacgtgcgggcgcggtcggcctctggcggggcgggggaggggagggagggtcagcgaaagtagctcgcgcgcgagcggccgcccaccctccccttcctctgggggagtcgttttacccgccgccggccgggcctcgtcgtctgattggctctcggggcccagaaaactggcccttgccattggctcgtgttcgtgcaagttgagtccatccgccggccagcgggggcggcgaggaggcgctcccaggttccggccctcccctcggccccgcgccgcagagtctggccgcgcgcccctgcgcaacgtggcaggaagcgcgcgctgggggcggggacgggcagtagggctgagcggctgcggggcgggtgcaagcacgtttccgacttgagttgcctcaagaggggcgtgctgagccagacctccatcgcgcactccggggagtggagggaaggagcgagggctcagttgggctgttttggaggcaggaagcacttgctctcccaaagtcgctctgagttgttatcagtaagggagctgcagtggagtaggcggggagaaggccgcacccttctccggaggggggaggggagtgttgcaatacctttctgggagttctctgctgcctcctggcttctgaggaccgccctgggcctgggagaatcccttccccctcttccctcgtgatctgcaactccagtctttctagaagatggcgcgccgatatcataacttcgtataatgtatgctatacgaagttatgggtaggggaggcgcttttcccaaggcagtctggagcatgcgctttagcagccccgctgggcacttggcgctacacaagtggcctctggcctcgcacacattccacatccaccggtaggcgccaaccggctccgttctttggtggccccttcgcgccaccttctactcctcccctagtcaggaagttcccccccgccccgcagctcgcgtcgtgcaggacgtgacaaatggaagtagcacgtctcactagtctcgtgcagatggacagcaccgctgagcaatggaagcgggtaggcctttggggcagcggccaatagcagctttgctccttcgctttctgggctcagaggctgggaaggggtgggtccgggggcgggctcaggggcgggctcaggggcggggcgggcgcccgaaggtcctccggaggcccggcattctgcacgcttcaaaagcgcacgtctgccgcgctgttctcctcttcctcatctccgggcctttcgacctcaattgcgccaccatgggactccaagcctgcctcctagggctctttgccctcatcctctctggcaaatgcagttacagcccggagcccgaccagcggaggacgctgcccccaggctgggtgtccctgggccgtgcggaccctgaggaagagctgagtctcacctttgccctgagacagcagaatgtggaaagactctcggagctggtgcaggctgtgtcggatcccagctctcctcaatacggaaaatacctgaccctagagaatgtggctgatctggtgaggccatccccactgaccctccacacggtgcaaaaatggctcttggcagccggagcccagaagtgccattctgtgatcacacaggactttctgacttgctggctgagcatccgacaagcagagctgctgctccctggggctgagtttcatcactatgtgggaggacctacggaaacccatgttgtaaggtccccacatccctaccagcttccacaggccttggccccccatgtggactttgtggggggactgcaccgttttcccccaacatcatccctgaggcaacgtcctgagccgcaggtgacagggactgtaggcctgcatctgggggtaaccccctctgtgatccgtaagcgatacaacttgacctcacaagacgtgggctctggcaccagcaataacagccaagcctgtgcccagttcctggagcagtatttccatgactcagacctggctcagttcatgcgcctcttcggtggcaactttgcacatcaggcatcagtagcccgtgtggttggacaacagggccggggccgggccgggattgaggccagtctagatgtgcagtacctgatgagtgctggtgccaacatctccacctgggtctacagtagccctggccggcatgagggacaggagcccttcctgcagtggctcatgctgctcagtaatgagtcagccctgccacatgtgcatactgtgagctatggagatgatgaggactccctcagcagcgcctacatccagcgggtcaacactgagctcatgaaggctgccgctcggggtctcaccctgctcttcgcctcaggtgacagtggggccgggtgttggtctgtctctggaagacaccagttccgccctaccttccctgcctccagcccctatgtcaccacagtgggaggcacatccttccaggaacctttcctcatcacaaatgaaattgttgactatatcagtggtggtggcttcagcaatgtgttcccacggccttcataccaggaggaagctgtaacgaagttcctgagctctagcccccacctgccaccatccagttacttcaatgccagtggccgtgcctacccagatgtggctgcactttctgatggctactgggtggtcagcaacagagtgcccattccatgggtgtccggaacctcggcctctactccagtgtttggggggatcctatccttgatcaatgagcacaggatccttagtggccgcccccctcttggctttctcaacccaaggctctaccagcagcatggggcaggactctttgatgtaacccgtggctgccatgagtcctgtctggatgaagaggtagagggccagggtttctgctctggtcctggctgggatcctgtaacaggctggggaacacccaacttcccagctttgctgaagactctactcaaccccggcggtggcggtggcggtaacaacatgttgatccccattgctgtgggcggtgccctggcagggctggtcctcatcgtcctcattgcctacctcattggcaggaagaggagtcacgccggctatcagaccatcgaacaaaaactcatctcagaagaggatctgtaatgactgtgccttctagttgccagccatctgttgtttgcccctcccccgtgccttccttgaccctggaaggtgccactcccactgtcctttcctaataaaatgaggaaattgcatcgcattgtctgagtaggtgtcattctattctggggggtggggtggggcaggacagcaagggggaggattgggaagacaatggcaggcatgctggggatgcggtgggctctatggtctgggataacttcgtataatgtatgctatacgaagttatcaatttaaatgtttaaacttctgggcaggcttaaaggctaacctggtgtgtgggcgttgtcctgcaggggaattgaacaggtgtaaaattggagggacaagacttcccacagattttcggttttgtcgggaagttttttaataggggcaaataaggaaaatgggaggataggtagtcatctggggttttatgcagcaaaactacaggttattattgcttgtgatccgcctcggagtattttccatcgaggtagattaaagacatgctcacccgagttttatactctcctgcttgagatccttactacagtatgaaattacagtgtcgcgagttagactatgtaagcagaattttaatcatttttaaagagcccagtacttcatatccatttctcccgctccttctgcagccttatcaaaaggtattttagaacactcattttagccccattttcatttattatactggcttatccaacccctagacagagcattggcattttccctttcctgatcttagaagtctgatgactcatgaaaccagacagattagttacatacaccacaaatcgaggctgtagctggggcctcaacactgcagttcttttataactccttagtacactttttgttgatcctttgccttgatccttaattttcagtgtctatcacctctcccgtcaggtggtgttccacatttgggcctattctcagtccagggagttttacaacaatagatgtattgagaatccaacctaaagcttaactttccactcccatgaatgcctctctcctttttctccatttataaactg

SEQ ID NO: 215 - DNA, 4229 bp, synthetic construct
  source 1..4229: mol_type = other DNA
gactgggcaggcagtgaagataaaacgtgcttgggaagtcccaggagctgctggcctgcacttaagagccctagacccatttcctcaaggtagaactttatctttgggtccagtggcaccctcttgacatgagcgtcgctgcggtgtttcgaggcctccggcccagtcctgagctgctgcttctgggcctgttgtttctgccagcggtggttgctgtcaccagcggtgagattgggtgaagggatgctagggacaggaagacagttcaggagcctcaggtgcggggaggtgaactctgatgacatcgggtcatattgtatgggctttccacctgccttccgaggggaaggcgatgctgtaaccaagcctgtggaaaggtccagaggtaccacaccggcagatgatagggtcatcgctatctcttctactcccctcttcttctccccgtttaccctcagctggtcccgaagaaagcgatggagatcttagctgtgtgtgtgtgaagaccatctcctctgggatccatcttaagcacatcaccagcctggaggtgatcaaggcaggacgccactgtgcggttccccagctcatgtgagtcctgcccacatcccccaggcccgtcctctcctctgctacctgttccttcccatctcttcccttcttccaaccaaggatctgtaaagcaattccttccctttcccctctttcccctctgacagagccaccctgaagaatgggaggaaaatttgcctggaccggcaagcacccctatataagaaagtaatcaagaaaatcctggaatcaggaagcggagctactaacttcagcctgctgaagcaggctggagacgtggaggagaaccctggacctccaaagaagaagcggaaggtcatggccaatttactgaccgtacaccaaaatttgcctgcattaccggtcgatgcaacgagtgatgaggttcgcaagaacctgatggacatgttcagggatcgccaggcgttttctgagcatacctggaaaatgcttctgtccgtttgccggtcgtgggcggcatggtgcaagttgaataaccggaaatggtttcccgcagaacctgaagatgttcgcgattatcttctatatcttcaggcgcgcggtctggcagtaaaaactatccagcaacatttgggccagctaaacatgcttcatcgtcggtccgggctgccacgaccaagtgacagcaatgctgtttcactggttatgcggcggatccgaaaagaaaacgttgatgccggtgaacgtgcaaaacaggctctagcgttcgaacgcactgatttcgaccaggttcgttcactcatggaaaatagcgatcgctgccaggatatacgtaatctggcatttctggggattgcttataacaccctgttacgtatagccgaaattgccaggatcagggttaaagatatctcacgtactgacggtgggagaatgttaatccatattggcagaacgaaaacgctggttagcaccgcaggtgtagagaaggcacttagcctgggggtaactaaactggtcgagcgatggatttccgtctctggtgtagctgatgatccgaataactacctgttttgccgggtcagaaaaaatggtgttgccgcgccatctgccaccagccagctatcaactcgcgccctggaagggatttttgaagcaactcatcgattgatttacggcgctaaggatgactctggtcagagatacctggcctggtctggacacagtgcccgtgtcggagccgcgcgagatatggcccgcgctggagtttcaataccggagatcatgcaagctggtggctggaccaatgtaaatattgtcatgaactatatccgtaacctggatagtgaaacaggggcaatggtgcgcctgctggaagatggcgatggaagcggagagggcagaggaagtctgctaacatgcggtgacgtcgaggagaatcctggcccagcggatcccgccaccatggtgagcaagggcgaggaggtcatcaaagagttcatgcgcttcaaggtgcgcatggagggctccatgaacggccacgagttcgagatcgagggcgagggcgagggccgcccctacgagggcacccagaccgccaagctgaaggtgaccaagggcggccccctgcccttcgcctgggacatcctgtccccccagttcatgtacggctccaaggcgtacgtgaagcaccccgccgacatccccgattacaagaagctgtccttccccgagggcttcaagtgggagcgcgtgatgaacttcgaggacggcggtctggtgaccgtgacccaggactcctccctgcaggacggcacgctgatctacaaggtgaagatgcgcggcaccaacttcccccccgacggccccgtaatgcagaagaagaccatgggctgggaggcctccaccgagcgcctgtacccccgcgacggcgtgctgaagggcgagatccaccaggccctgaagctgaaggacggcggccactacctggtggagttcaagaccatctacatggccaagaagcccgtgcaactgcccggctactactacgtggacaccaagctggacatcacctcccacaacgaggactacaccatcgtggaacagtacgagcgctccgagggccgccaccacctgttcctggggcatggcaccggcagcaccggcagcggcagctccggcaccgcctcctccgaggacaacaacatggccgtcatcaaagagttcatgcgcttcaaggtgcgcatggagggctccatgaacggccacgagttcgagatcgagggcgagggcgagggccgcccctacgagggcacccagaccgccaagctgaaggtgaccaagggcggccccctgcccttcgcctgggacatcctgtccccccagttcatgtacggctccaaggcgtacgtgaagcaccccgccgacatccccgattacaagaagctgtccttccccgagggcttcaagtgggagcgcgtgatgaacttcgaggacggcggtctggtgaccgtgacccaggactcctccctgcaggacggcacgctgatctacaaggtgaagatgcgcggcaccaacttcccccccgacggccccgtaatgcagaagaagaccatgggctgggaggcctccaccgagcgcctgtacccccgcgacggcgtgctgaagggcgagatccaccaggccctgaagctgaaggacggcggccactacctggtggagttcaagaccatctacatggccaagaagcccgtgcaactgcccggctactactacgtggacaccaagctggacatcacctcccacaacgaggactacaccatcgtggaacagtacgagcgctccgagggccgccaccacctgttcctgtacggcatggacgagctgtacaagtaataggtatcagctgcctaaatgtcaattgtgttacaagactcctggaatcttgtctacttttaatgtaactgcaatcttccgatgtttatattatccttcaagatttaaataaatgcattgaaccaagttgtcataaagtcaagctatttttgtaatgaagccaaaaaatgtgtcatgagtaaggaaacatctccaaaactttaagtatttttgatgggaggtttggtctaagaactgaatttgcttggtgttactggttgtacggcagctgatgaatatttgcatatatacttaattacatagtctcctggttacacttcggttttgtgttgtaattagctttgtcaaaaaaacaggaagggggctcaacatagtgagttgcctttgaaaataagcacctaaatcaaactttgattcaattttctcaagattatcataaaaattaaaataataagagattagagtgaatacataatgctaatatgttgatcctttcaagaaaccgtatgaaaatatctttctttttatgagttcttgaagaaagtttatgtttcaaaaatgaaatattaaaaataacttttattcttatactattgcctgtaggggggtcttcacctggcaaacttaagagtcctactaggacctattaatctatcacctcactgctgctccaagcatgtagatgtcttagcgagactttctgcaggattcttgggctcagaagaaacttgatttgtaattcagttttctttaagatctcctcataacacggtatgctaagcagccacaggaagcagggc

SEQ ID NO: 216 - DNA, 2188 bp, synthetic construct
  source 1..2188: mol_type = other DNA
ggggcggcagtgtgtgtgggagggggagccttggggtgtgcgtggccaagacactcagtctgtcagctccagggagggaagcaagctgaatggggaaacgggtggagtgcagggaggaaaaggttaaggccctgtgtgggaaggggtaggagacaaaggtgccctgtctattttagagggaataggaggcaaagagagccaggcattcatatcatctgatctagcttcgccattggccccaggcacgttcttgggccctgagtcatgggaagggtagagaagaaggggcttttgggaaatctcaggggtggtgagaacccagcctcagaaactggtggatgccaacaatcctaatgtaatgatgccctcttctgacagctgcggggaccgcagagaggtcccatcccagatgcactcctgaaacctgcttttctttttctagcaacaccaagaaggagggggacttgttggctgcgcaggcccggctcaaggacctcgaggctcttctcaactccaaggaagctgccctgagcactgctctcagtgagaagcgcacattggagggcgagctccatgacctgcgggggcaggtagccaaggtaggccgctgtcctgtgaccccagtgaccccacctggtccgacatatcattcggtcccatttgcctgctcaccttcacttctccagtctagaacactgctcatcctaaagcaacccacagcccagttctggttcccctcctcctgtctccctagacagctccaagcacttcagaggagagctgtccactgaggccataacagaataacttcgtataaagtatcctatacgaagttatgcataacttcgtataatgtatgctatacgaagttatagcgggacgcttacctcgctgtaaatgttcttctggaagtcaagctcctccttcagcgtctgtagcctgttctcagcatccacccacctcagcatctcatcctgaagctgcttcttagcctctcccagggccgcctcaagctgagagggagaaagccaagttcatggagaggtgggagggggttcaggaaatgccaaaggagaggtgatggctgtccccatctagaggcagggtctagaggcagggaaggccttcagtgcccacggggggaagaaaggacacccacattctacccatggcactaagaaatcaagggtgagggcctgtaagatggcccagcaggtgagggcgcatgccattaggcccggacaacctgagctccatccttagagcctacatggcagaaggagaggacaggttcctgcaagttgtcccctggtcttaacatgtgtgctggggcatgtcaggggcccacaaaagaaaaaaaaaagtgaaaaaacaaagaatttaaaattaatagtaaattccccataacttcgtataggatactttatacgaagttatgttgggttttttttgtttgtttgttttgtttttaaaaagatttatttattttatgtatatgagtacactgtagctgtcttcagacacaccagaagaggacatcagatccccattacagatgattgtgagccaccatgtggttgatgggaattgaactcaggaccttgaggaagagcagtcaatgctcttaaccactgagccatctctccagcccccataacagagtgctgatagctaattatacctaggtgtgctgcctgtgtgtgcagtgtccgctactttccaagctctcctctctgcaactctgctctctcatgctgctcaggagtgaagaagttagggacacagttccctgctctcctccctccccagctcttccaggcctgcagttgcccaagatgaacaccttagcttggtgcttcccctggaaaccattctccagggcagttaagggtctctcctcctggtctaacccttgcctgcgggtcctactccctcctcctgcacaccacaccccagcagcacttcagctccagcaagacctgtcttcctgacagttaaggatgatgtctgtacctgacctgccactgcagccactcatgtcccttcccagcctccactcacatgcccttcccaggtcttcccacccccacccccatgctttgttcccatcttcctgctcctgctgcagtctatgtggacctccttcatagtaactgctgctccaagagagggagatcctgcacagggg

SEQ ID NO: 217 - DNA, 3634 bp, synthetic construct
  source 1..3634: mol_type = other DNA
aacctcccacacctccccctgaacctgaaacataaaatgaatgcaattgttgttgttaacttgtttattgcagcttataatggttacaaataaagcaatagcatcacaaatttcacaaataaagcatttttttcactgcattctagttgtggtttgtccaaactcatcaatgtatcttatcatgtctggatctgcgactctagaggatcataatcagccataccacatttgtagaggttttacttgctttaaaaaacctcccacacctccccctgaacctgaaacataaaatgaatgcaattgttgttgttaacttgtttattgcagcttataatggttacaaataaagcaatagcatcacaaatttcacaaataaagcatttttttcactgcattctagttgtggtttgtccaaactcatcaatgtatcttatcatgtctggatctgcgactctagaggatcataatcagccataccacatttgtagaggttttacttgctttaaaaaacctcccacacctccccctgaacctgaaacataaaatgaatgcaattgttgttgttaacttgtttattgcagcttataatggttacaaataaagcaatagcatcacaaatttcacaaataaagcatttttttcactgcattctagttgtggtttgtccaaactcatcaatgtatcttatcatgtctggatccccatcaagctgatccggaacccttaatataacttcgtataatgtatgctatacgaagttattaggtccctcgacctgcagcccaagctagatcgaatttctagactcgagtggatccgccaccatggcgggaggaatcaaagtgtcggtgtggtcggcggttggtccagggccccggtgctggggggccgggggcggcggcggcgccacatggctgctcttggtcgtcgccggctgcgtggtctgcggctcagctgatgtaaatgtggtcatgcttcaggaatcccaagttgatatgaattccagtcaacaattctgttataaaaatgtgcttatcccaaagtggcatgatatatggacacggatacaggttcgggtaaatagttccaagttggtccgagttacccaggtggacaatgaggagaagctgaaggagctagagcagtttagtatctggaactttttttcttcttttttaaaagagaaattgaatgacacctatgttaacgtgggtctgtacagcactaaaacctgcctcaaggttgagatgatagagaaggacaccacgtacagtgtcactgtgacccggagatttgaccccaaactcttccttgttttcctcctcggactgacactgtttttttgtggagacttgttgagcaggagtcaaattttctactattccactgggatgagtgtgggaatcgtggcctctctcttaatcgtcatttttatgatctctaagtttatgcccaagagaagccccatttacgtcatcctggtaggaggctggtccttctctctgtacctcattcagctagtttttaagaatttacaggagatatggaggagttactggcattatcttctaagctacatcctcacagttggattcatgagttttgcagtgtgctacaaatatgggcccctggaaaatgaacgaagcattaacctgctgacctggacgctgcagctgctgggcctgggactcatgtattccagtatccagatcccgcacgttgcctttgctctcatcgtcattgcactgtgcactaagaacctggaataccctatccactggctgtgcagcacctacagaaggatgtgtaaggcatcaggaaagcctgtcccccctcgcctcctgacagaagaagagtatcggatacaaggagaggtggagacccaaaaggctttacaggaactccgagaattttgtaacagtccggagtgctctgcctggaagaccatatctcgaattcagtctccaaaaagatttgctgactttgtggaaggttctttccacctcacgccaaatgaagtttctgttcacgaacaggagtatggattagggagcatctttacccaggatgaggagctgtcctcagaagaggagggctcagagtaccccactttcacacagaacaatttcttgactggaagcggaatgaacaccccgggaattaacctgatcaaggaggacatgcgcgtgaaggtgcacatggagggcaacgtgaacggccacgccttcgtgatcgagggcgagggcaagggcaagccctacgagggcacccagaccgccaacctgaccgtgaaggagggcgcccccctgcccttcagctacgacatcctgaccaccgccgtgcactacggcaaccgggtgttcaccaagtaccccgaggacatccccgactacttcaagcagagcttccccgagggctacagctgggagcgcaccatgaccttcgaggacaagggcatctgcaccatccgcagcgacatcagcctggagggcgactgcttcttccagaacgtgcgcttcaagggcaccaacttcccccccaacggccccgtgatgcagaagaagaccctgaagtgggagcccagcaccgagaagctgcacgtgcgcgacggcctgctggtgggcaacatcaacatggccctgctgctggagggcggcggccactacctgtgcgacttcaagaccacctacaaggccaagaaggtggtgcagctgcccgacgcccacttcgtggaccaccgcatcgagatcctgggcaacgacagcgactacaacaaggtgaagctgtacgagcacgccgtggcccgctacagccccctgcccagccaggtgtggtaacttaagtttaaaccgctgatcagcctcgactgtgccttctagttgccagccatctgttgtttgcccctcccccgtgccttccttgaccctggaaggtgccactcccactgtcctttcctaataaaatgaggaaattgcatcgcattgtctgagtaggtgtcattctattctggggggtggggtggggcaggacagcaagggggaggattgggaagacaatagcaggcatgctggggatgcggtgggctctataattcacagtgtcgcgagttagactatgtaagcagaattttaatcatttttaaagagcccagtacttcatatccatttctcccgctccttctgcagccttatcaaaaggtattttagaacactcattttagccccattttcatttattatactggcttatccaacccctagacagagcattggcattttccctttcctgatcttagaagtctgatgactcatgaaaccagacagattagttacatacaccacaaatcgaggctgtagctggggcctcaacactgcagttcttttataactccttagtacactttttgttgatcctttgccttgatccttaattttcagtgtctatcacctctcccgtcaggtggtgttccacatttgggcctattctcagtccagggagttttacaacaatagatgtattgagaatccaacctaaagcttaactttccactcccatgaatgcctctctcctttttctccatttataaactgagctattaaccattaatggtttccaggtggatgtctcctccccc

SEQ ID NO: 218 - DNA, 2293 bp, synthetic construct
  source 1..2293: mol_type = other DNA
cgccccactccctttttcattgaggtatttatatcaagagaacaaatcctaagtattgagctggtaagtttttacatgtggatatgcctgtgtaagcactactcagaaagctcacttttgctccaagagtaactattgtcatagcctgtaaactagattagctttgcatgattttgaattttgtaaaaatggcagtggggatggaaagaaggcttagcagttaagagaatgtatgcttgggctacaggtgacctggggaagaattcagttagatgctctacctcctgttgacttaggggtcagtgtaaacagaggcaggaatcactaagcaagggcccctaggttgtggctctggttaacagagtagccttgacatagactgagaagcactcagagcctgatctgttatttgccatgccatttatgtgcactgccatttgtgtctttggactcaggtgtggaaacagatcaagtgtctctggaaaggctccagtgttgcaagaagcttggttccattcaaggaaggcgggatggtggggggtgggcaccacaggccagagagcggaggtgcagacccagcagttgtgcctccagctgggtgtagactctgaatggttggtgggcatgagcctggacagccaacttggtgactatcagcagtgggccctgtggtaagcaaaagacataatgctgagctgggcgaggtacagatgggcaaatggggagtcacagctcccgctctagcatgtgcccacgtgatgaaccatgtcttagcttgttttccttctggcagccaggaataacttcgtataaagtatcctatacgaagttatccggccagaccctgatcctctgccctttacgcaccgcccaaggcatcctgtacactctcctacctgctccagctcttcctcagcatatttttgacggctcctctcattctcagtaccctcccacagctccttcagccgctgagcttcctgcttggcaaggttgatctcatctcgcagcttcttctccaggtggaccttctctacttccacagttcggtgctcctcctgggccttgtgcagcctgggagtggggcaggaagaagggggacaatgtagaaagcaggagaggaggcaaggaggtgccagccaacatgccataagttatggtaataaggaagaaaataagagccaccagctctcagcatatagcctgtctactctgctggctgtgtagctctgagatagtcagggccaacagaaaccaatcactagctttaaatcttatgttagccattattctactgctagtaaacaagaccatgaagccagggttcacaaacatctgaatccctccctaaagtaccttgtacattgaaattataacaactaccagtttacaaggcagttcacgtttttttttttttcctagcaataacttcgtatagcatacattatacgaagttatgcataacttcgtataggatactttatacgaagttatccttgtaaacttctggttgggtagagttccaccttaaactgtttccctagctcctagtgctacctgcagctactctttctcatgagaactcgggattcaggagttttagggagtgccaaggttctctcattttgactacagttcagttcaggtgtttgaggctattttctgaagaactaggcttaaatccacctctactctgggcccactgacctggacctttccaccttcaggctctcacactctgcatctccccaacccatgtttataagtgggaagagattcataagtcaaataaatgatcgtgtgtgtgtgtgtgtgtgtgtgtgtgtgtgtgtgtattaaggaagtgaaaactaaaatcacaatgaaataccattacagctaccagaatgcctaaaattaaaatgcctagagatataaagatcatgcatcactgatagcagcattgatgggtttaaccctcatgagaaactatttagcattttcctaccctcttctctacctccagtgctatagatcaaactagggctttatatgttagcaaatactctaccactgaaccatattccaaacctcatttgatggtttctactaaagctaatacataaacgttttattactatatgcacaacagatatgagtgtttatgctcaccaagagatacgtattcaggaatgtccataatagtcttacttgtcatcctgtgtcctgcagcaggccacttggaggaggcaggggggaaagtctgaaatggggagtccacggcggttcccatcctcctctctgggtacccagg

SEQ ID NO: 219 - DNA, 3688 bp, synthetic construct
  source 1..3688: mol_type = other DNA
ctgaagtagtccactactaggtcaggccctcctgcccaggagtaatactgcccacagtgggctagatcctcttatatcaattaataatttaaaaataatgccccccacagacatgcccacaggccagtctgatggacgaaattcttcaaactgaggttccctcttcccagatatttctaggtttttaacaagtttgcaaaaaccaaccagcagcataggtagcaaactaaacttagctgtgaacatgaaacactcactacaaaaatgagttagactgctcaacagactccagaatcaaacttagacctcccctttatcgcaagtctatagcttggacgaattcatgcatctatcttctttgtcctcactccaggattgtgctttgtggacaagagatagtcaactccgtggttccccgttccagtggcgtctttgactttcagaaagcttatgacttgtctgaggaggaggtaagtgtgggagagctgctcttgagtcttacgatctacagatttgaagacctgacaaaatttcccaggagcaggaccaagagcaacatctatcagtttccactgggtggccccagatgtttcatccatccctgaacatagtcattgataaagccatggtgtgtcctgggcattccttaacctcaaaatctacttccatttcccccttataggccctggatgtcagtgatcactttccagttgagtttaagctacagtcttcaagggccttcaccaacaacagaaaatctgtttctctcaaaaagagaaaaaaaggcaatcgctccctgcagtcgacggtaccgcgggcccgggatccaccggtcgccaccatggtgagcaagggcgaggaggataacatggcctctctcccagcgacacatgagttacacatctttggctccatcaacggtgtggactttgacatggtgggtcagggcaccggcaatccaaatgatggttatgaggagttaaacctgaagtccaccaagggtgacctccagttctccccctggattctggtccctcatatcgggtatggcttccatcagtacctgccctaccctgacgggatgtcgcctttccaggccgccatggtagatggctccggataccaagtccatcgcacaatgcagtttgaagatggtgcctcccttactgttaactaccgctacacctacgagggaagccacatcaaaggagaggcccaggtgaaggggactggtttccctgctgacggtcctgtgatgaccaactcgctgaccgctgcggactggtgcaggtcgaagaagacttaccccaacgacaaaaccatcatcagtacctttaagtggagttacaccactggaaatggcaagcgctaccggagcactgcgcggaccacctacacctttgccaagccaatggcggctaactatctgaagaaccagccgatgtacgtgttccgtaagacggagctcaagcactccaagaccgagctcaacttcaaggagtggcaaaaggcctttaccgatgtgatgggcatggacgagctgtacaagggaagcggagctactaacttcagcctgctgaagcaggctggagacgtggaggagaaccctggacctatgaaccggggagtcccttttaggcacttgcttctggtgctgcaactggcgctcctcccagcagccactcagggaaagaaagtggtgctgggcaaaaaaggggatacagtggaactgacctgtacagcttcccagaagaagagtatacaattccactggaaaaactccaaccagataaagattctgggaaatcagggctccttcttaactaaaggtccatccaagctgaatgatcgcgctgactcaagaagaagcctttgggaccaaggaaactttcccctgatcatcaagaatcttaagatagaagactcagatacttacatctgtgaagtggaggaccagaaggaggaggtgcaattgctagtgttcggattgactgccaactctgacacccacctgcttcaggggcagagcctgaccctgaccttggagagcccccctggtagtagcccctcagtgcaatgtaggagtccaaggggtaaaaacatacagggggggaagaccctctccgtgtctcagctggagctccaggatagtggcacctggacatgcactgtcttgcagaaccagaagaaggtggagttcaaaatagacatcgtggtgctagctttccagaaggcctccagcatagtctataagaaagagggggaacaggtggagttctccttcccactcgcctttacagttgaaaagctgacgggcagtggcgagctgtggtggcaggcggagagggcttcctcctccaagtcttggatcacctttgacctgaagaacaaggaagtgtctgtaaaacgggttacccaggaccctaagctccagatgggcaagaagctcccgctccacctcaccctgccccaggccttgcctcagtatgctggctctggaaacctcaccctggcccttgaagcgaaaacaggaaagttgcatcaggaagtgaacctggtggtgatgagagccactcagctccagaaaaatttgacctgtgaggtgtggggacccacctcccctaagctgatgctgagtttgaaactggagaacaaggaggcaaaggtctcgaagcgggagaaggcggtgtgggtgctgaaccctgaggcggggatgtggcagtgtctgctgagtgactcgggacaggtcctgctggaatccaacatcaaggttctgcccacatggtccaccccggtgcagccaatggccctgattgtgctggggggcgtcgccggcctcctgcttttcattgggctaggcatcttcttctgtgtcaggtgccggcaccgataggtatcacgctgcctttttttttttttttttttttttttgccactccttgcaaatggctctcataggtctaagctatctgcatgctcaggaattaagactggccaagctgctttcattgtccacttgagttaattttgcctggaaccaagctgggaggagagtcttctgttacatcaccttgatccccaatatcatcactggtaccctgcgaaacattgccactatttaggcaacaggacagatttggcatggtatgatactttatgatggaggcaatgaaactcagttgcctggggtcatgcgtggaagaagagtgaaggacacttccactgtgctgtcctgcccgtccctactcacagcccacccctacccacacctcactcctatccacacctcactcctatccacacctcacccctagctacagcccacctgtgctcacagcgctgtgcttaagccatcagcatgtcctgagctcagtcttcggatatatgaaggttttcattatctgacagccagcctcactttggatgcatgctccaacagtgtcttccctccctttctcccttcctcttcctcctgtgcccctccctgaaagggctcaaccttgcatgcctgtcctgttctaactgtccccagtcacatatcccatgtgcaacactgaccacacagtgtctgtcaccacggccagcactgcagctcgccccagcacaagcccccctggctggcttggacctgagtgtttgctcccttcctgccactcctggaatctgcaatgtggcgccatcttgcttg

SEQ ID NO: 220 - DNA, 3139 bp, synthetic construct
  source 1..3139: mol_type = other DNA
gcggagaacaagtctggctgaagaagataggactcaggcagtggtgcaccacctctgcttgtgctgatgcggctcatcctcaggatggccccgtggcagtggggggaagccaggagccccaagcacaggtagctctgtagtttattctacagctacctctttcccatgccctacaactgtcagagtcaaggcttgtgactgagccagtgtagagcacccataggtctgactggtccctcttcctgccttcctctggggtgggaccatggtcccaggtgaacacctcagctctgagatggggctcattcagcaggctggcagtctagataacagaaggtgctgtgggagcaaggctggagtcaggctccacacaggtgggcacgggtctgccttagccctgtctcttaactgccgtcccagccaggtagcaattccatgggcctagcatacccataaaggacagcaggacacagcagggcctggcaagtcactctgcatcatctgcagaagccatcaccactacaggactgagtagagccctcctgtgtgttagccagcctctgtcaagatgtttagacagggctgaagtcagtgccatgactcatagattgtcatgacaagatgctcacagctctgagtgacaccacctcacccctaagaggctgcctgctccttactacctcaaaactgtatcctctttttactttgaaattctctaggcttacagaaaattatgaagaaaaaaaaaagtaaacctcttatacctttaactcagcctctcctgtcacacagcatagacataacttcgtataggatactttatacgaagttattgccttggagatcataacagactatgaacctcacaaccaagaaaggcaggagagggtgctaggccttggaaaggcatgagggcaaggtggattggttgccatgccacagcaaggggcctttattagatgttcagggcacagacaggtggatgctagatggtgtagcacaccttctcagggtggagtggtgcctggatgtccagtttgcgggtcttgctgtccttatcaatgatctccagtcgcaatgtaggtggacgcttctcagcctggggtgagggcagctcagggctcttgaggaggtgcttgtccgaatcctccacagtgatacgcagggtgcaaccccctggtagcaggtcctgctcataggctgccgccagttggtttaccacacgccgctctacctgcaggtggtagaagatgacatggccattatgccttggcctgtacctgacctgtggctggagccaggagctggagctggcctctgtcatgtgtttgggcgagccagcatctcggagtcttagttcttacttgcaaactgggctaaacagctacaagctcacaggctactgctaaaggcttcatgatggtagtttttgaggctctcagcccaggttcttcaaatgagggttcatactaactcatccagtttaagagactatttttaaaaattaatttatttattcactttacattctgatcatcctccccgactctgtccctcctctcctctcctctcctctcagtcccttacaattccctccattccccattccccttagtttctctctctctctcttttaaatgtacattggtgttttgattgtatgtacctgtgtgaggggtcagatccctggaacaggagttacagacagttgtgaactggcatgtgggtgctgggaatagaacctgggttctcaggaagagcagccagtgctcctaaccattaaacatctctccaacgccccctccccaccacttagttttaattgattatcttttttttttttttttagttctgaaaggacttctgttggtatggataattctagcagctaaactacagggagactggctgagcctgaaaggtaagtttgtggtcaccaaggagaaaggtataaaggtaccatgcttgtttcaggcttctgtgctcacctcatgcttaatggagcaggcaccatagtggacgttgtagccatcaaccaacacatctgccacctcgcggtcccacagtagtgtgatgttgtgcctctgcttggcctgaggtgggtcagagagaggtctgtctgcatgtggcccagtgccttccagctctaggcacattggtccaggagggccttgagactgtgccccttggacagccggacccacatcaccttggggtcgttctttgagttccagatatcttatcccacccatgggcagtcagttctcttacttataacttcgtatagcatacattatacgaagttatgcataacttcgtataaagtatcctatacgaagttatgcatggggagtgacaggaccaggaaagtagcattgccacacactcctgccccatctgcaggctgtggctttcaccagcctggacatcccacagtgcattctactttccatcgccttcccctgtgtcgcccaaggcagtttctgtgtcttccctgctcttcggtgatcgtgacacttttgaagagtccaggccagttcttttgtagaatatccttcagccgagctctatctaatgctctcactgatgagtctgggggtctgcgtttttggcaaggtgaccacagagaccaatgccctgctgcctccctcacagcacgtggcagtaaccccaaagctcgaattgtctggaaaaaggtcccctactgtaaaattgaaagtttcacgctggggtgtagtattagaccttggctagcatgcacagaggcccgggttgattcccagtgccacaaaaataaataagtgtataaatataattttttcctagaactaaaatcaagccagactacttactggtttgtgcctggactcccagcaattgggaggttgaggtaggattgtcacaagtttgaggctactttgtgctgcatactaagttccaggccagcctaggctacatagtaaaacccaatctccaagagtcaagtggatacatctctataaagtcgagactggcctggtctgcagagagagctgcgggccagccaggactgcagagtgagaccttgtcttaaaaaacagcaatcctttaccatggcccagcaggttatggcactttttacccagcctgatgacttgag

SEQ ID NO: 221 - DNA, 2356 bp, synthetic construct
  source 1..2356: mol_type = other DNA
ggcaaaagctagggaatccccaggattgtgccgggacctctgtgccacctgtgaagcaagtctctctctagtgtggatgacccgtgctccttttgctttcacacggaatttcccagttatgtaattaataaaaatcaatgatttccacatcctgtctgtcttatgtcttggggggtggggaggccaggaagattccaggaaggtcagagtccttgctgcacaaacagtggatggactttgctccatcacacagtccatggaaagactgatcttttaaattgggggtagtggaggtggtggtctgtgcttgttaggaggggtctgggggctaagagggagctttgaaagggaagttctggcccttggtcagtcaagggtggggctcacatagtttctgtttcctcagttggcagttcagctggggccctccttcatgaatgttccgggaagcagtggctgcgtgcgcagggtaggctggccaggctgcagatgccagagcagattgcataaaaggttaggggacagtgggaaaggggtgtagccagatccagcatttgggtttcagtttggacaggaggtcaaataggcacccagagtgacctggagagggctttgggccactggactctctggtgctttccatgacaatggagagcccccagctctgcctcgtcctcttggtcttaggcttctcctctggaggtaagcaaaggatattccatcctctttttgtccccagcatctgtctttggccttctggggccagacttcactagactttctcctcaggtgtgagcgcaactatggtgagcaagggcgaggagctgttcaccggggtggtgcccatcctggtcgagctggacggcgacgtaaacggccacaagttcagcgtgtccggcgagggcgagggcgatgccacctacggcaagctgaccctgaagttcatctgcaccaccggcaagctgcccgtgccctggcccaccctcgtgaccaccctgacctacggcgtgcagtgcttcagccgctaccccgaccacatgaagcagcacgacttcttcaagtccgccatgcccgaaggctacgtccaggagcgcaccatcttcttcaaggacgacggcaactacaagacccgcgccgaggtgaagttcgagggcgacaccctggtgaaccgcatcgagctgaagggcatcgacttcaaggaggacggcaacatcctggggcacaagctggagtacaactacaacagccacaacgtctatatcatggccgacaagcagaagaacggcatcaaggtgaacttcaagatccgccacaacatcgaggacggcagcgtgcagctcgccgaccactaccagcagaacacccccatcggcgacggccccgtgctgctgcccgacaaccactacctgagcacccagtccgccctgagcaaagaccccaacgagaagcgcgatcacatggtcctgctggagttcgtgaccgccgccgggatcactctcggcatggacgagctgtacaagggtggctctggaggtggcggtagtggtggatccgctactccagtgttggaggcccggccccaagtctcctgctctctggagggagtagagatcaaaggcggctcctttcaacttctccaaggcggtcaggccctggagtacctatgtccctctggcttctacccataccccgtgcagactcgaacctgcagatccacaggctcctggagcgacctgcagacccgagaccaaaagattgtccagaaggcggaatgcagaggttggagattgggggatgtgggcagtgggcagctgggcagagtggggtggaggctgttcagtgctgggtaagatgagagctatgagactggcagtctgacccgtgggctggttgagcacaggcacacctctgcaggtgtgtgatgggaggctttcctcgggcagtgaaaacaatactcagaaaaccagaaagggggtctagaaatgtagatcagttggtagagtgcttgcctaccatgcacaaagcagtactgcatgaagcaggtgtggtgcgtgcctgcagccctaacactcaggacataggggcaggagcttaacgatcttcagcttcatagttggaagccagcctgggctacatgagaccttgcctcagagcaaacaaaatagtcccataacacaagaggcgggacagtagggttgaggggactaggcaggtactgtttctcagtcacaggatttctaagaccaggaaggacctagaaacagcgctcagtgacttttacctgtctttcctaaagcaatacgctgcccacgaccgcaggactttgaaaatggggaattctggccccggtccccct

SEQ ID NO: 222 - DNA, 4446 bp, synthetic construct
  source 1..4446: mol_type = other DNA
gtacctgccatgcccctgttagtaactgagtactacagcaggagcaggtgttctctagaaagcctgagacaactctacttcttctctcaagagaccacctaatacaggcctgagagaacagactctggaaatagatgggacttacggagctaagatctagagctcatctacagagcagaatcccagccaagagaacaaagaatactgactctctcctgttccctactcctagagttctaaaacacactatagggaagggagcctctagacctccgtccattccccatcttgctcattccatcttcccatgtccccaggtctccaagccacagacaccacctttcctattcacccacctttctgtgtccctaggtccccaggccatagtcacctccccccacaccccgctcaccctgccccatctatgcccctagatgcttacttaccagagtcttttgtctgacgtggggctacaagcatctatgctccctaagcacctactgctgacctgtaggacccagctctgaaccaactcatataagtaaatacagactctcccctgtcttaggatggccccctgggtcaggaggagaccactgccaaggaaccttctcttagagcactgaactcctcccctgtaccacttaggacagacctgagacctattattactgattaccagagctctggcagtgaccacggaggagatagatccaccctggacacaggaaacacagcaccagagatactgcttcatcacaacagtagagtgacactttagactttaatttgggtcactttcctgctgtagaggtgggatcagaaagcaaagagcagtatgagtgcctgataggcacccaagtacactatagagtactcatggtgaataaggtacctccatggcttcccagggaggggcactgccccacccccaccatcacagacctttctccatagttgataactcagacacaagtgaatgacagatggacctccatctgctcttattttaaaaagaagacaaaccccacaggctcgagaactttagcgactgttttgagagaaatcattggtccctgactcaagagatgactggcagattggggatcagaatacccatactctgtggctagtgtgaggtttaagcctcagagtccctgtggtctctgactggtgcaaggttttgactaagcggagcaccacagtgcctagatttaccagcacaggtgcacagaaatcaaacccgtgaatatttccacatgagagacctcgaaatgaatgagcaggtagacatgtctactggtaagcttagccacatcagttaaatgccgtagaattgaagtacataagtcatcctctgaggttaatgtgtcccacttggtgcaggtgtattctgctatcaccactaagaataatgttaacaattacaaaattacaacatggaagggaggtgctcttgaggaaccacagcaagctgggggtctcttggcatttgatgactggtgggcaaaatatcatgtctttgttttggggaagatttctggaggttcactctttactagtgacgagcctatctatgtgtatataggtagtagtaattaaattcactgtgtctttagctaatgaagcagaagaggtcaggatgttaggaaagagacttactggaaagttccaaggggaaaacagggacctagtgttggtagatcgtggttcagagagtggtggttgatcatagcatatttcatatatgattgaaaatttcaaagaataaaaatccctatgaaatatagaaataacaactttacaaatatatagaatttttatagaggtgtattttgtacaatgtgcatatttctccagtaacatcttgttcctcctattttccctcttttctacttgacagttggaacatcatcatgtatatgtaaacatagttgtctattgttatgaaaatatatgttaataataagagtaacatttaatgtttttgattttgagatcatattaattaatatagttatatctaattccattcattttttccagaatcagtgtaaatttctggtaaaaatcatttatttgaaatctatgacttagtgataaaatcctttgttgacacatctatagtttatatctataatttagttaatcatggtattggtgtaataatcactgatgtgtaaatatacatgtacttttatccattttagtgaattttgaagtacataacctgtggtaaaggcaaatattacttgaacgtatcttaaagaaggttctaatatctaaagttagccacttttggaatttaccatcagatcatcatcatcatcatcatcatcatcatcatcatcatcatcatgatgctcacaaagcaccatcgctaaatccatgtgttaatattgtcctaaagtggagcagcagactcaggccaaaaatttattgagaacttagtccctgaagttacatccacaacatctggccagggctcagggaaagtgtttgggatgcttttcctcagggaggattatgacttggaccctagcatcctgctgcatgacccatgtgccttttcagtgctttctccctagttcttctccagctggactaggtcattaactaagaaatgcactgctcatgaatatgcaaattacttgagcctatggtagtaaatacaggcatgcccacactgtgaaaacaacatatgactcctgtcttctccacagtcccagaacacactcactctaaccatggaatggccttgtatctttctcttcctcctgtcagtaactgaaggtaaggagctcagcagttccaatctgaagaggagatagggcctgaggtgacaatgacatccacaatttctttctcccgacaggtgtccactccgaggtgcagctggtggagtctgggggaagtgtggtccagcctgggagggccctgagactctcctgtgcagcctctggaatcaccttcagtagctttggcatgtactgggtccgccaggctccaggcaaggggctggagtggctgggagttatagcgtatgatggaagtaatacatactatgcagactccgtgaagggccgattcaccatctccagagacaattccaagaacacgctgtatttgcaaatgaacagcctgagaattgaggacacggctgtctattattgtgcgaaagattattacccgctgctatcgtactactacggtttggacgtctggggccaagggaccacggtcaccgtatcctcaggtaagaatggcctctccaggtctttatttttaacctttgttatggagttttctgagcattgcagactaatcttggatatttgtccctgagggagccggctgagagaagttgggaaataaactgtctagggatctcagagcctttaggacagattatctccacatctttgaaaaactaagaatctgtgtgatggtgttggtggagtccctggatgatgggatagggactttggaggctcatttgaagaagatgctaaaacaatcctatggctggagggatagttggggctgtagttggagattttcagtttttagaataaaagtattagttgtggaatatacttcaggaccacctctgtgacagcatttatacagtatccgatgcatagggacaaagagtggagtggggcactttctttagatttgtgaggaatgttccgcactagattgtttaaaacttcatttgttggaaggagagctgtcttagtgattgagtcaagggagaaaggcatctagcctcggtctcaaaagggtagttgctgtctagagaggtctggtggagcctgcaaaagtccagctttcaaaggaacacagaagtatgtgtatggaatattagaagatgttgcttttactcttaagttggttcctaggaaaaatagttaaatactgtgactttaaaatgtgagagggttttcaagtactcatttttttaaatgtccaaaattcttgtcaatcagtttgaggtcttgtttgtgtagaactgatattacttaaagtttaaccgaggaatgggagtgaggctctctcataacctattcagaactgacttttaacaataataaattaagtttcaaatatttttaaatgaattgagcaatgttgagttggagtcaagatggccgatcagaaccagaacacctgcagcagctggcaggaagcaggtcatgtggcaaggctatttggggaagggaaaataaaaccactaggtaaacttgtagctgtggtttgaagaagtggttttgaaacactctgtccagccccaccaaaccgaaagtccaggctgagcaaaacaccacctgggtaatttgcatttctaaaataagttgaggattcagccgaaactggagaggtcctcttttaacttattgagttcaaccttttaattttagcttgagtagttctagtttcccc

SEQ ID NO: 223 - DNA, 3459 bp, synthetic construct
  source 1..3459: mol_type = other DNA
ggagtcgttttacccgccgccggccgggcctcgtcgtctgattggctctcggggcccagaaaactggcccttgccattggctcgtgttcgtgcaagttgagtccatccgccggccagcgggggcggcgaggaggcgctcccaggttccggccctcccctcggccccgcgccgcagagtctggccgcgcgcccctgcgcaacgtggcaggaagcgcgcgctgggggcggggacgggcagtagggctgagcggctgcggggcgggtgcaagcacgtttccgacttgagttgcctcaagaggggcgtgctgagccagacctccatcgcgcactccggggagtggagggaaggagcgagggctcagttgggctgttttggaggcaggaagcacttgctctcccaaagtcgctctgagttgttatcagtaagggagctgcagtggagtaggcggggagaaggccgcacccttctccggaggggggaggggagtgttgcaatacctttctgggagttctctgctgcctcctggcttctgaggaccgccctgggcctgggagaatcccttccccctcttccctcgtgatctgcaactccagtctttctagaagatgggcgggagtcctgacctcttctcttcctcccacagggccaccatgggtaagaagagtcgagtaaaaactcagaaatctggcactggtgctacagcaactgtgtcaccaaaggaaatcttgaacctgaccagtgagctgctgcagaaatgcagcagtccggcgcctggcccaggaaaagagtgggaagagtatgtgcagatccggactctggttgagaaaatacggaaaaagcaaaaaggtctgtccgttacttttgatggaaaaagagaagattactttcctgatctaatgaaatgggcctctgaaaatggggcttctgtcgagggttttgaaatggttaacttcaaagaagagggctttggtttgagagcaacaagagatatcaaggcagaagaattgtttttatgggttccacgaaaattgctaatgactgttgaatctgctaaaaattcagtgttggggcccttatattctcaagaccgaatccttcaagccatgggaaacatcgcactggcctttcatttgctgtgtgagcgagccagccctaactccttctggcagccctatattcaaaccctccccagtgaatatgacactcctctctactttgaagaagatgaagttcggtatcttcagtccacacaagctatacatgatgtcttcagccagtataaaaacacagctcgacagtacgcctacttctataaagtcatccagacccatcctcatgccaacaaactacccttgaaggattctttcacttacgaggactacaggtgggcagtctcttctgttatgacgaggcaaaaccaaattcccacagaggatggttcccgcgtgaccctggctctgattcctttatgggatatgtgtaaccacaccaacggcctgatcactactggttacaacctggaagatgaccgctgtgagtgtgtggctctgcaggattttcgggctggagagcagatttacattttttatggcactcgatccaacgcagagtttgtgatccacagtggttttttctttgacaataactcacacgacagagtgaaaataaagcttggagtgagtaaaagtgacagactctacgccatgaaggccgaggtcttggctcgtgccggcatccccacttccagtgtttttgcattgcattttaccgagccgcccatctctgctcagcttttggcttttctccgagtattctgtatgactgaagaagaactgaaagaacacttgctgggagacagcgctattgatagaatcttcaccttggggaactcggaatttcctgttagctgggacaacgaggtcaaactttggacatttcttgaagatagagcctcacttcttttaaaaacatataaaacaactattgaggaagataaatccgtcttgaaaaaccacgatctttctgttcgtgcaaaaatggccatcaaattgcgcttaggtgagaaagagattttggaaaaagcagtaaagagtgcagctgtcaaccgggaatactatcgccaacagatggaggaaaaggctccgcttcccaaatatgaagagagtaaccttgggctgttggagagcagcgtgggggactcgaggctccccctggtcttgagaaacctcgaggaggaggctggagtgcaggatgccttgaacatcagagaggcaatcagcaaagcaaaggccacagaaaacgggcttgtaaacggtgaaaactctatccctaatgggaccaggtccgaaaatgaaagtctcaatcaagaaagtaaaagagcagttgaagacgccaaaggatcttcttcagacagcactgctggagttaaggagtagctgtgccttctagttgccagccatctgttgtttgcccctcccccgtgccttccttgaccctggaaggtgccactcccactgtcctttcctaataaaatgaggaaattgcatcgcattgtctgagtaggtgtcattctattctggggggtggggtggggcaggacagcaagggggaggattgggaagacaatagcaggcatgctggggatgcggtgggctctatttctgggcaggcttaaaggctaacctggtgtgtgggcgttgtcctgcaggggaattgaacaggtgtaaaattggagggacaagacttcccacagattttcggttttgtcgggaagttttttaataggggcaaataaggaaaatgggaggataggtagtcatctggggttttatgcagcaaaactacaggttattattgcttgtgatccgcctcggagtattttccatcgaggtagattaaagacatgctcacccgagttttatactctcctgcttgagatccttactacagtatgaaattacagtgtcgcgagttagactatgtaagcagaattttaatcatttttaaagagcccagtacttcatatccatttctcccgctccttctgcagccttatcaaaaggtattttagaacactcattttagccccattttcatttattatactggcttatccaacccctagacagagcattggcattttccctttcctgatcttagaagtctgatgactcatgaaaccagacagattagttacatacaccacaaatcgaggctgtagctggggcctcaacactgcagttcttttataactccttagtacactttttgttgatcctttgccttgatccttaattttcagtgtctatcacctctcccgtcaggtggtgttccacatttgggcctattctcagtccagggagttttacaacaatagatgtattgagaatccaacctaaagcttaactttccactcccatgaatgcctctctcctttttctccatttataaactgagct

SEQ ID NO: 224 - DNA, 3043 bp, synthetic construct
  source 1..3043: mol_type = other DNA
gtagatctctctaggaaggacaagccacaccttttcagacagccaatgaaacatctacatttcaatgtgtagaagctaaacagtagttacggacagtcctctatggtacaaattcgttacactacatacacaaatatacaacaagcaaaacaaccttcataataagatagcctaggtcccagctacctgtcaccgttgtgtcactaacagttttgtgtcttctgatggttcagaaaagagggacagtactatcgtgttttataagctttggtgacagttgtcggttttgtataaggactgcatcatccctccccccgccccccattgcagtcttgtttctggcctctccgagttctttgaagggaaggagaagagagcgcagaatccaggagcagcccactttccgaaccccacgcaggcgagccccacgaaggcgagccgcccgagctctcagaagcagggtgggcggctggggagggttgaaaaggcacagagctcctcggggtcaattaaaccattcctcagacatctgccacgttgcacagggcacatccctgctcactctctgattaacctttaattcactcaactagtacatttcttcaagccaaaagcttatgagtgcttaatactggggagaaagcgagaacagcgtgtgagtctcacgtctctttcgtagacagcaatgaaatgggtgactgtggaggcggcttctctctagcacatctcttcggtctgttcagttcagacagcagcagcagcagccagttctgttggggcctaggaggctatcggtgccggcacctgacacagaagaagatgcctagcccaatgaaaagcaggaggccggcgacgccccccagcacaatcagggccattggctgcaccggggtggaccatgtgggcagaaccttgatgttggattccagcaggacctgtcccgagtcactcagcagacactgccacatccccgcctcagggttcagcacccacaccgccttctcccgcttcgagacctttgcctccttgttctccagtttcaaactcagcatcagcttaggggaggtgggtccccacacctcacaggtcaaatttttctggagctgagtggctctcatcaccaccaggttcacttcctgatgcaactttcctgttttcgcttcaagggccagggtgaggtttccagagccagcatactgaggcaaggcctggggcagggtgaggtggagcgggagcttcttgcccatctggagcttagggtcctgggtaacccgttttacagacacttccttgttcttcaggtcaaaggtgatccaagacttggaggaggaagccctctccgcctgccaccacagctcgccactgcccgtcagcttttcaactgtaaaggcgagtgggaaggagaactccacctgttccccctctttcttatagactatgctggaggccttctggaaagctagcaccacgatgtctattttgaactccaccttcttctggttctgcaagacagtgcatgtccaggtgccactatcctggagctccagctgagacacggagagggtcttccccccctgtatgtttttaccccttggactcctacattgcactgaggggctactaccaggggggctctccaaggtcagggtcaggctctgcccctgaagcaggtgggtgtcagagttggcagtcaatccgaacactagcaattgcacctcctccttctggtcctccacttcacagatgtaagtatctgagtcttctatcttaagattcttgatgatcaggggaaagtttccttggtcccaaaggcttcttcttgagtcagcgcgatcattcagcttggatggacctttagttaagaaggagccctgatttcccagaatctttatctggttggagtttttccagtggaattgtatgctcttcttctgggaagctgtacaggtcagttccactgtatccccttttttgcccagcaccactttctttccctgagtggctgctgggaggagcgccagttgcagcaccagaagcaagtgcctaaaagggactccccggttcataggtccagggttctcctccacgtctccagcctgcttcagcaggctgaagttagtagctccgcttccggcatagtcggggacatcatatgggtatgcataatcaggcacgtcgtagggataagcgtaatctggaacatcgtatgggtaagagccaccgccaccagagccaccgccacctgcggttgatcctgagccctgggatgctggctgtgcagggggctgtgtggtcccctgtggctgcgtggtggccggaggggagccagtctgcagctgggcctgaaactgggcgagctgctccggactggccagcgtcttcagcagattgttctcctgctccagctgggagtttttctctattagttctttgatctgctccttcagaacttccacttcctccctcaccgcatacatcaaatggcttttcaccagatcctgaaaacaggaggcaaagaaaggctttagcttactaggtcctggactctccctaaccaattatttattctatctccaaagagcatttaaagcacacttgtggaaatctgcgcataatcacaaccgcgcaatactcaagtttaatgtatacgtgatcaagctttccaaaagtctccagactttctctgcagacattaatgacgtctacagtccagtttccaattcaagatggcaaaccgcaccacacaggggctcaggccctgtgttcgctctcctccaggcccgaggcccagtggccgcttccccgcccccaggccctcccggcgcagggagcgtcccctcccatctcctccctcccttggcaccggctgcagccagttcctacagagcgtgttgccgcattttcttccctccacctctactccccccagcccccccttgattaagctgacatcacagaaacctgggcagacgtcgtagccaatgggagcccgagttatttatagctctgaattaaaggttcagagtttgcctagcaacagtgg

SEQ ID NO: 225 - DNA, 3638 bp, synthetic construct
  source 1..3638: mol_type = other DNA
gcatgtgtgtgtgtgtggtcctaggttctatcatgtgtgtgtgtgtgtgtgtgtgtgtgtgtgtgtggtcctaggttctatcatgtgtgtgtgtgtgtatgtgtgtgtgtgtgtaggagagggggagacagggacagagagacagagacagagacagagaaacagtgtcagacagatatcccaaattatgatattgggatagatttcaccttgaaggccccaaggaacatatccctccacaagttggaacagagagagaatggaataaggtgtgtatccaaccataaaaggagggcagcctcattttcggaataagggctaggtaggcaattaggctaaagatgtttaagagagttaaccccgaggcaggcttcatcagtaggagagcaatggcccccgttggatccgaagcatcttatgctcagcataaccggaggtgccctgggtacgtggggcagcccactgagaagccacagcggggcacacgggtgcggctcctctcacgcctcacttgactgctctggactccccaccctaggcagccgggcgggcgcggttccggaggggttgggggggggggggagttgggcgggctgggcggggaggaggcggggctgctgcattgccttcacccagctgctcccgcccgctagcagccagagcgagtggagcctccgccagctccggcgggcagcgggcgctggagcgcagcgcagcgcagctcagctcagcgcgcagcaccatcggtccgcagagcggactgagctagaagctgagcgctgtcgccggaggcgagcaatgaatttactgaccgtacaccaaaatttgcctgcattaccggtcgatgcaacgagtgatgaggttcgcaagaacctgatggacatgttcagggatcgccaggcgttttctgagcatacctggaaaatgcttctgtccgtttgccggtcgtgggcggcatggtgcaagttgaataaccggaaatggtttcccgcagaacctgaagatgttcgcgattatcttctatatcttcaggcgcgcggtctggcagtaaaaactatccagcaacatttgggccagctaaacatgcttcatcgtcggtccgggctgccacgaccaagtgacagcaatgctgtttcactggttatgcggcggatccgaaaagaaaacgttgatgccggtgaacgtgcaaaacaggctctagcgttcgaacgcactgatttcgaccaggttcgttcactcatggaaaatagcgatcgctgccaggatatacgtaatctggcatttctggggattgcttataacaccctgttacgtatagccgaaattgccaggatcagggttaaagatatctcacgtactgacggtgggagaatgttaatccatattggcagaacgaaaacgctggttagcaccgcaggtgtagagaaggcacttagcctgggggtaactaaactggtcgagcgatggatttccgtctctggtgtagctgatgatccgaataactacctgttttgccgggtcagaaaaaatggtgttgccgcgccatctgccaccagccagctatcaactcgcgccctggaagggatttttgaagcaactcatcgattgatttacggcgctaaggatgactctggtcagagatacctggcctggtctggacacagtgcccgtgtcggagccgcgcgagatatggcccgcgctggagtttcaataccggagatcatgcaagctggtggctggaccaatgtaaatattgtcatgaactatatccgtaacctggatagtgaaacaggggcaatggtgcgcctgctggaagatggcgatctcgagccatctgctggagacatgagagctgccaacctttggccaagcccgctcatgatcaaacgctctaagaagaacagcctggccttgtccctgacggccgaccagatggtcagtgccttgttggatgctgagccccccatactctattccgagtatgatcctaccagacccttcagtgaagcttcgatgatgggcttactgaccaacctggcagacagggagctggttcacatgatcaactgggcgaagagggtgccaggctttgtggatttgaccctccatgatcaggtccaccttctagaatgtgcctggctagagatcctgatgattggtctcgtctggcgctccatggagcacccagtgaagctactgtttgctcctaacttgctcttggacaggaaccagggaaaatgtgtagagggcatggtggagatcttcgacatgctgctggctacatcatctcggttccgcatgatgaatctgcagggagaggagtttgtgtgcctcaaatctattattttgcttaattctggagtgtacacatttctgtccagcaccctgaagtctctggaagagaaggaccatatccaccgagtcctggacaagatcacagacactttgatccacctgatggccaaggcaggcctgaccctgcagcagcagcaccagcggctggcccagctcctcctcatcctctcccacatcaggcacatgagtaacaaaggcatggagcatctgtacagcatgaagtgcaagaacgtggtgcccctctatgacctgctgctggaggcggcggacgcccaccgcctacatgcgcccactagccgtggaggggcatccgtggaggagacggaccaaagccacttggccactgcgggctctacttcatcgcattccttgcaaaagtattacatcacgggggaggcagagggtttccctgccacaggaagcggagctactaacttcagcctgctgaagcaggctggagacgtggaggagaaccctggacctatgaggagggcaggtgctgcctgcagcgccatggaccggctgcgcctgctgctgctgctgctgctgcttctaggggtaagtgattagtaggagggacctccgttaaccttttcaaagagctgaaccccaaggggatgtgggtgccaccacccagggaacagaataagacgttaaggtcccagatgctggcaacgggtggcggaggagctgcgggatcatgacccacaggggcgctcctagcttctaggactttcagagcgcagaggcgacccagtcccaggatagagatgcagacaggactgttgcaacgacacccgttcttggttctgcttgctgctgctggttcttgagcactacgacgggtgcggtgtaggagactgggagcagtctcgagtggggtggagggaggtttgggaatctcgggcgcctgggttcttttgacgacagcgtgtgaattttgggatcccgaggggagttttctctttagcatcttagtccctggggagttgtagggcagagagaaggaagggaaagagatcggcactaaagatgtgaggggctagagacggaacaatgcgggaggcagctggagggactggaggcagaggggacccagtatggacaatggggaccggccagacaatgggggggaggggcatcgaaaggagcgattcgggagtggcagagaggttgaagagagagaagtgggctttatggagggcagaaaagagacaaccacaaaagagatagagaaatggaaagaaggtgcataccctaaagtgctcggggccccgcctgtc

SEQ ID NO: 226 - DNA, 2400 bp, synthetic construct
  source 1..2400: mol_type = other DNA
catgaataagcaggtaaagcggtctatctacattcccacgaggttctggtccattagaccctggttcttccgctattgatgtctttgtgactcagcaccctggcctccacacagggcttatagatgaggaaagccagagtagtccaagcaggccaggatgctcttggtaggcacatgaacccagagtatggttcctaaaatactggaacaaggggaggctagaccttgagccagaaaaatcaaattgaaagagtgggaaaggatgggaaatgcccccacctacttcatttagcaatggcagagatggagcaaagggcctttcacatgctcggcaaatatccgcatcactgagttatatatacatcatccctactctttctgtcttggtggaaaataacatcaacagtaacaggtgtctagcttttttcttttttaaagatagggtctgagtaacactagctgtcctggaactcatatggaaaccaggctgtccttgaactcaagaggtggtcctgcctcctatcccgagtgctggagtcaaaagatgtgtaccagcacataagtccagccttctgcaaacctttaatccagtccttttaaagtttagcctgcaggagcaaggagttaaaggtggagtttaggtagtcttcagggtaaggataataaacacttctctttccagttccgggcttgcattctggagatggtgtgcaggaagcccatggcagacgaatctgacgtgtctggctctcagaaaacagaagtttctactgtctcttctagcaaagttggccctcacggaagcggagctactaacttcagcctgctgaagcaggctggagacgtggaggagaaccctggacctcccaagaagaagaggaaggtgatggtgagcaagggcgaggagctgttcaccggggtggtgcccatcctggtcgagctggacggcgacgtaaacggccacaagttcagcgtgtccggcgagggcgagggcgatgccacctacggcaagctgaccctgaagttcatctgcaccaccggcaagctgcccgtgccctggcccaccctcgtgaccaccctgacctacggcgtgcagtgcttcagccgctaccccgaccacatgaagcagcacgacttcttcaagtccgccatgcccgaaggctacgtccaggagcgcaccatcttcttcaaggacgacggcaactacaagacccgcgccgaggtgaagttcgagggcgacaccctggtgaaccgcatcgagctgaagggcatcgacttcaaggaggacggcaacatcctggggcacaagctggagtacaactacaacagccacaacgtctatatcatggccgacaagcagaagaacggcatcaaggtgaacttcaagatccgccacaacatcgaggacggcagcgtgcagctcgccgaccactaccagcagaacacccccatcggcgacggccccgtgctgctgcccgacaaccactacctgagcacccagtccgccctgagcaaagaccccaacgagaagcgcgatcacatggtcctgctggagttcgtgaccgccgccgggatcactctcggcatggacgagctgtacaagtgaggcccctcagctggcctgctagcagcaaacacaacgccacatttaagtatctacatctccactagaatcctaaccattaacaggggaaagatggggagtggtggcactctggtgagtcaccttcattttcctgttactctctgcctgtagcagggccacatggaccattttaacagtcacagtttctaagtggcactctcacctctggagaactgtgagagaagggctgcgtttctggtgtatgggtaacacttccttttttgctctttttttttttttttctcctccctgctggggatctgagatgatatatccagtattagaataagcttggcatggggcagtgccaagaaaaggcagcagacaccgggcacctgcagtgaatcgaagagcttccttatgtggcctctcccagttgctgcagtctgggctatggctgccaggatcagaatggcctcacctcatttatctgacacagagttattctaggtgttctccccttcatttggctaaatgtatccatttaaagctatgcgttgattaaagttagtgtcttaatctcttgatgtcctcaaaatgaatttgcatgtttcagtggcatttataaatcaagcccaagtgctaaaaacatcttactttataccctccttacacctgctgctcctggaaaaggagcccctcgaaacgaagaagtgcgtgttgagttatacgcaaggagtgctgggtactgatatcaggcactgaaggtaggaaagccgtagctgtgagaaggagccagaaatctcaggaatagc

SEQ ID NO: 227 - DNA, 3627 bp, synthetic construct
  source 1..3627: mol_type = other DNA
cctcaaattgtggagacatgaaagactaaggtccagtggcttcagtattaactccatagcatcgtggctgagtgagttcatggaatgacttgatgttgttgtgcataatcttcctccctataaaataacacagtaatcgagtagaacaatgcttaaagtaacttcccacttaagaagcggtagggttacttttttgcggggggagggactccggcaaagcaagtgaacattccccagggaggattaatacagatatccaacctgaagtgtcattcaaaagggaacaatcaccttttctctttctttgccagccagataacatgggacacccaaccccttctctcagactgacagacctctcagggaaggggacaagagaactggcagctagtttctgcagtgagccgtgaatctgccaaactccatgcctgcttgaacctcagctgcctcgattatccacgcaagggagcaacagttaaacctcaatgtgcaatgtctcttttagcaaagggggttcgctgttccccttatccctcactcatgggggccctgcgtgctacttcctggctcgcctagtggtcctaccgcgctgggtcggctgccccgcgctcacactgtgcaccgaagcccgccttgcgctaactaatgtttaactcaggccgaaacttggcggcgagctcagggtgactgcgtgcagagcagccgcgcaggacgtccgtctctgcgcgcagtgacttctgcctgcgctcaagcttcagagttcagtttcaaggagccgcccgaccatgaatttactgaccgtacaccaaaatttgcctgcattaccggtcgatgcaacgagtgatgaggttcgcaagaacctgatggacatgttcagggatcgccaggcgttttctgagcatacctggaaaatgcttctgtccgtttgccggtcgtgggcggcatggtgcaagttgaataaccggaaatggtttcccgcagaacctgaagatgttcgcgattatcttctatatcttcaggcgcgcggtctggcagtaaaaactatccagcaacatttgggccagctaaacatgcttcatcgtcggtccgggctgccacgaccaagtgacagcaatgctgtttcactggttatgcggcggatccgaaaagaaaacgttgatgccggtgaacgtgcaaaacaggctctagcgttcgaacgcactgatttcgaccaggttcgttcactcatggaaaatagcgatcgctgccaggatatacgtaatctggcatttctggggattgcttataacaccctgttacgtatagccgaaattgccaggatcagggttaaagatatctcacgtactgacggtgggagaatgttaatccatattggcagaacgaaaacgctggttagcaccgcaggtgtagagaaggcacttagcctgggggtaactaaactggtcgagcgatggatttccgtctctggtgtagctgatgatccgaataactacctgttttgccgggtcagaaaaaatggtgttgccgcgccatctgccaccagccagctatcaactcgcgccctggaagggatttttgaagcaactcatcgattgatttacggcgctaaggatgactctggtcagagatacctggcctggtctggacacagtgcccgtgtcggagccgcgcgagatatggcccgcgctggagtttcaataccggagatcatgcaagctggtggctggaccaatgtaaatattgtcatgaactatatccgtaacctggatagtgaaacaggggcaatggtgcgcctgctggaagatggcgatctcgagccatctgctggagacatgagagctgccaacctttggccaagcccgctcatgatcaaacgctctaagaagaacagcctggccttgtccctgacggccgaccagatggtcagtgccttgttggatgctgagccccccatactctattccgagtatgatcctaccagacccttcagtgaagcttcgatgatgggcttactgaccaacctggcagacagggagctggttcacatgatcaactgggcgaagagggtgccaggctttgtggatttgaccctccatgatcaggtccaccttctagaatgtgcctggctagagatcctgatgattggtctcgtctggcgctccatggagcacccagtgaagctactgtttgctcctaacttgctcttggacaggaaccagggaaaatgtgtagagggcatggtggagatcttcgacatgctgctggctacatcatctcggttccgcatgatgaatctgcagggagaggagtttgtgtgcctcaaatctattattttgcttaattctggagtgtacacatttctgtccagcaccctgaagtctctggaagagaaggaccatatccaccgagtcctggacaagatcacagacactttgatccacctgatggccaaggcaggcctgaccctgcagcagcagcaccagcggctggcccagctcctcctcatcctctcccacatcaggcacatgagtaacaaaggcatggagcatctgtacagcatgaagtgcaagaacgtggtgcccctctatgacctgctgctggaggcggcggacgcccaccgcctacatgcgcccactagccgtggaggggcatccgtggaggagacggaccaaagccacttggccactgcgggctctacttcatcgcattccttgcaaaagtattacatcacgggggaggcagagggtttccctgccacaggaagcggagctactaacttcagcctgctgaagcaggctggagacgtggaggagaaccctggacctaaggtgagtgcaccccgcgtcgcacctccctggaccagagggtcgggttgtgggtggtgtttagacagattctctccaaactgccccagttttcctggaggcaaccaggagctgccattaggcggaagccacggggccaccctcacaggtgaaggcacgtccgtcccgggaactggcttagatctctggcgtgtcctactgggacccaggcactgagccttggaagtcggggacggtcacccgtggaacgcacgcggcactctcatttggcatcagacgggtgggtgggaggagagaagccaacaagatcataagatcatgctcagggccaaaattcaagggcttctgcctgagtgaacgccaaacccctcaggtctactagtgcacctgcaaactcctctgcctctgaaggggcctaagtcccaaccctcttcgcagagaggaacaaagacttcccctctaattgtttgcaatctgacctgcttgcagacaccgtggaaggttcttctgggactgcttggtgtcgctgcgcttgtcaccatcatcaccgtgccaatagttctgctgagcaaaggtagaaccttgcaacatcttaaaaagagagggtggttggagacggggtcaggcggctctcaaagcgagctcagtttattggggggccttgacccctgtgctgggttatggctgaagagactggtaagtgtctctaaatgtatttgctgcttctgggggctccagtgtttaggccttgaggcttcctcgttttgttgtgtataacaaatacacacttcctgacactggg

SEQ ID NO: 228 - DNA, 3634 bp, synthetic construct
  source 1..3634: mol_type = other DNA
gtcttgtatgaacctaatggtggacgggaacttctggacagaccatgtcagtgtaaagagatttcagagggcagagctcattgcaagtcaggtggaggagtgggtcggtgtgacttggcaattttgatggatttgttatgtttttctctacagtgccttatctgaaacaaataaaaacgacttgaaggaacattaatggtcatttaaagggaaagcagaccttcccctgcagcatcgccctaagatgcttgcttgcttgcttccttccttcctatcttcttatctgtatgtctttcttcctttcttcctttcttccttccttcctttctttctttctttctttctttctttctttctttctttctttccttctttctgtctgtctgtctgtctgtcttcctctttctttctttctttcttcttcttctttcttttctttctctctttcttataacaacttttttcttgaattaactttctcctagcaacaatcacaaataataaccaccaccatctgtacatatgaaagtaagaatcctttcaagctactcactaagaccccttttccccacagtgtgtcctgagagccatggagaaattatgatgacggatcttgaaaaaaaagacgagactcagttggaccagccgatgaaccagcaacaagctttgcctatccgtccaaaggacagcaataaactgtctgggaaacagttggccttacggagaggactcctgctcctaggggtagtcttagtcttggtgggtgggattttagtgagagtctatatcagaattgaaggaagcggagctactaacttcagcctgctgaagcaggctggagacgtggaggagaaccctggacctaatttactgaccgtacaccaaaatttgcctgcattaccggtcgatgcaacgagtgatgaggttcgcaagaacctgatggacatgttcagggatcgccaggcgttttctgagcatacctggaaaatgcttctgtccgtttgccggtcgtgggcggcatggtgcaagttgaataaccggaaatggtttcccgcagaacctgaagatgttcgcgattatcttctatatcttcaggcgcgcggtctggcagtaaaaactatccagcaacatttgggccagctaaacatgcttcatcgtcggtccgggctgccacgaccaagtgacagcaatgctgtttcactggttatgcggcggatccgaaaagaaaacgttgatgccggtgaacgtgcaaaacaggctctagcgttcgaacgcactgatttcgaccaggttcgttcactcatggaaaatagcgatcgctgccaggatatacgtaatctggcatttctggggattgcttataacaccctgttacgtatagccgaaattgccaggatcagggttaaagatatctcacgtactgacggtgggagaatgttaatccatattggcagaacgaaaacgctggttagcaccgcaggtgtagagaaggcacttagcctgggggtaactaaactggtcgagcgatggatttccgtctctggtgtagctgatgatccgaataactacctgttttgccgggtcagaaaaaatggtgttgccgcgccatctgccaccagccagctatcaactcgcgccctggaagggatttttgaagcaactcatcgattgatttacggcgctaaggatgactctggtcagagatacctggcctggtctggacacagtgcccgtgtcggagccgcgcgagatatggcccgcgctggagtttcaataccggagatcatgcaagctggtggctggaccaatgtaaatattgtcatgaactatatccgtaacctggatagtgaaacaggggcaatggtgcgcctgctggaagatggcgatctcgagccatctgctggagacatgagagctgccaacctttggccaagcccgctcatgatcaaacgctctaagaagaacagcctggccttgtccctgacggccgaccagatggtcagtgccttgttggatgctgagccccccatactctattccgagtatgatcctaccagacccttcagtgaagcttcgatgatgggcttactgaccaacctggcagacagggagctggttcacatgatcaactgggcgaagagggtgccaggctttgtggatttgaccctccatgatcaggtccaccttctagaatgtgcctggctagagatcctgatgattggtctcgtctggcgctccatggagcacccagtgaagctactgtttgctcctaacttgctcttggacaggaaccagggaaaatgtgtagagggcatggtggagatcttcgacatgctgctggctacatcatctcggttccgcatgatgaatctgcagggagaggagtttgtgtgcctcaaatctattattttgcttaattctggagtgtacacatttctgtccagcaccctgaagtctctggaagagaaggaccatatccaccgagtcctggacaagatcacagacactttgatccacctgatggccaaggcaggcctgaccctgcagcagcagcaccagcggctggcccagctcctcctcatcctctcccacatcaggcacatgagtaacaaaggcatggagcatctgtacagcatgaagtgcaagaacgtggtgcccctctatgacctgctgctggaggcggcggacgcccaccgcctacatgcgcccactagccgtggaggggcatccgtggaggagacggaccaaagccacttggccactgcgggctctacttcatcgcattccttgcaaaagtattacatcacgggggaggcagagggtttccctgccacataatgtgggaatgccatcaatccagcaacttgggtgctcctcagtctgtgaagttaatgctgaacaaatccaccccacattgaaacatcagggctggggatactgcagacagcaatatgttcagcatgttctgggccctctaacataagttctctctctctctctctctctctctctctgtatgtgtctctctttgggtgtgtgtttgagagagacagagagagggagacacccccccaagagatataaacagaaagacaaagagacatagatgagacagaggcagaggagatgctctggagtggacaatgcctgcaatatacttacctaccaaataccagtattcgaaacattgtaccaaccggaatgttgattttgcacccctgggattgcagggagtcacctggagactctagctcactgccactgtccccatgtttccaaaggatagtgtcacacattgtgaacccaggaaaagctccccgttcaaaaacagtctcttctgaatgcgtgtcacttttgcatcaatgttaaagttgagcccctggaaagtgaatcactgtttaagtctgggcccacgtgcagttttgaacatagagacaattcagagccagtcattatagttaacagaattcaactgtgcccatgggaattatgaactgagaattcaaaaattttgtttctctaataaataaggtaaacaccatatagtgcaatgtgggggagactatgggggagtattaattcatctgccactgtcaaacatgcactgctgtctactgtcttcattccgggctgg

SEQ ID NO: 229 - DNA, 2710 bp, synthetic construct
  source 1..2710: mol_type = other DNA
cagtgtctttccatcgaagccacacagcaactgtgcggtcccaagttgagaacccaacagcctctcatgtggacaatgaatacagccagcctcccaggaactctcacctgtctgcttatccaggtgaggggggggggggctgttgggcagccggcctggtgggagagagggcacatgcggtgtggaagtgctgaccttgaagtttttgtgcttttccaaagagggaaagggaggctccagggggtggaggatgagactgcctacttgacagctggtcccagcagggtggtggcagggatgcagccttcacaggtctctgctgtccctttggagaccttgaaaccctcatctagagagaagaatgcagttggatggatgccattaaccccagccttgctgtgacctaatgggcctgtttgcctgcgggccctgaggggctagaagataaatgagcccctcagatctctctgagccaggacggagccattaagtggtccacaggagcctccaatacttggctcctcacaggcactcacaattaagtcccagggggcctgaagttcagcatcattagtgaacacttggccagtctgatcaaaactgatacaggcctgtcaccatctcagaaaacctctgtgatcttgctacccactcatctcctggggttttgtgcagcctccaggacctctttaataggtaatcctttctctctagctctggaaggagccctacaccgatcttctacacaacctgacaactcctctgacagtgactatgacctgcaagtggctcagagactgggaagcggagctactaacttcagcctgctgaagcaggctggagacgtggaggagaaccctggacctcccaagaagaagcgcaaggtgaatttactgaccgtacaccaaaatttgcctgcattaccggtcgatgcaacgagtgatgaggttcgcaagaacctgatggacatgttcagggatcgccaggcgttttctgagcatacctggaaaatgcttctgtccgtttgccggtcgtgggcggcatggtgcaagttgaataaccggaaatggtttcccgcagaacctgaagatgttcgcgattatcttctatatcttcaggcgcgcggtctggcagtaaaaactatccagcaacatttgggccagctaaacatgcttcatcgtcggtccgggctgccacgaccaagtgacagcaatgctgtttcactggttatgcggcggatccgaaaagaaaacgttgatgccggtgaacgtgcaaaacaggctctagcgttcgaacgcactgatttcgaccaggttcgttcactcatggaaaatagcgatcgctgccaggatatacgtaatctggcatttctggggattgcttataacaccctgttacgtatagccgaaattgccaggatcagggttaaagatatctcacgtactgacggtgggagaatgttaatccatattggcagaacgaaaacgctggttagcaccgcaggtgtagagaaggcacttagcctgggggtaactaaactggtcgagcgatggatttccgtctctggtgtagctgatgatccgaataactacctgttttgccgggtcagaaaaaatggtgttgccgcgccatctgccaccagccagctatcaactcgcgccctggaagggatttttgaagcaactcatcgattgatttacggcgctaaggatgactctggtcagagatacctggcctggtctggacacagtgcccgtgtcggagccgcgcgagatatggcccgcgctggagtttcaataccggagatcatgcaagctggtggctggaccaatgtaaatattgtcatgaactatatccgtaacctggatagtgaaacaggggcaatggtgcgcctgctggaagatggcgattaaaaggtgagcccacccctgcctggtgcttgacacccagggaaccagcacctccactgtccataatggacagaggcccctagaatattcttcacataacaggggtgggggggagtgaaccagtctgccatcccaacacctaggaagagtcataagtttaaggtgaatctagtccacatagctagttccaggccagccagagatacatagcaagcctgtctcaaaagaaaagaaaaatacagagatagatatatagatatatacatatacacacacacacacaccccatcaacaacaacaaacaacaatttacataatggagccacctgagcgaatggtggaagaatcactgatcttaaagccatcctgtgaaattccatcatgaaaagccactgaaaatatttaaagagctggggagacagctgtcagcaaagcagcggcttacaagcaggcaggcctgagtgtgaaactctaaacccatatttaaaacaaacaaacaaacaaacaaacaaagctaggtatcatggcatacactttataatcccagccatggtgtggtgggagacagagacagaccctagcatttgctagcttagtctatgtggccaagtttcaggccaatggcagatcctgcctccaacagaaagtagaagaggcttccaaaatacctaaggctgtctgtcctctaagctccacatgcaagtgcacacgtatgttctctctctctctctctctctctctctctctctctctctctctctctctcacacacacacacacacacacacacacacacacac

SEQ ID NO: 230 - DNA, 3118 bp, synthetic construct
  source 1..3118: mol_type = other DNA
aacctcccacacctccccctgaacctgaaacataaaatgaatgcaattgttgttgttaacttgtttattgcagcttataatggttacaaataaagcaatagcatcacaaatttcacaaataaagcatttttttcactgcattctagttgtggtttgtccaaactcatcaatgtatcttatcatgtctggatctgcgactctagaggatcataatcagccataccacatttgtagaggttttacttgctttaaaaaacctcccacacctccccctgaacctgaaacataaaatgaatgcaattgttgttgttaacttgtttattgcagcttataatggttacaaataaagcaatagcatcacaaatttcacaaataaagcatttttttcactgcattctagttgtggtttgtccaaactcatcaatgtatcttatcatgtctggatctgcgactctagaggatcataatcagccataccacatttgtagaggttttacttgctttaaaaaacctcccacacctccccctgaacctgaaacataaaatgaatgcaattgttgttgttaacttgtttattgcagcttataatggttacaaataaagcaatagcatcacaaatttcacaaataaagcatttttttcactgcattctagttgtggtttgtccaaactcatcaatgtatcttatcatgtctggatccccatcaagctgatccggaacccttaatataacttcgtataatgtatgctatacgaagttattaggtccctcgacctgcagcccaagctagatcgaatttctagactcgagtggatccgccaccatgggcgaccgcggaggcgcgggaagctctcggcgtcggaggaccggctcgcgggtttccgtccagggtggtagtgggcccaaggtagaagaggacgaggtgcgagacgcggctgtgagccccgacttgggcgccgggggtgacgcgccggctccggctccggctccagcccatacccgggacaaagacgggcggaccagcgtgggcgacggctactgggatctgaggtgccatcgtctgcaagattctttgttcagctcagacagtggtttcagcaattatcgtggtatcctgaattggtgtgtggtgatgctgatcctgagtaatgcaaggttatttttagagaaccttatcaagtatggcatcctggtggatcctatccaggtggtgtctctgtttctgaaggacccctacagctggcctgccccatgcgtgattattgcatccaatatttttgttgtggctgcatttcagattgagaagcgcctggcagtgggtgccctgacagagcagatggggctgctgctacatgtggttaacctggccacaatcatctgcttcccagcagctgtggccttactggttgagtctatcactccagtgggttccgtgtttgctctggcatcatactccatcatgttcctcaagctttattcctaccgggatgtcaacctgtggtgccgccagcgaagggtcaaggccaaagctgtctctacagggaagaaggtcagtggggctgctgcccagcaagctgtgagctatccagacaacctgacctaccgagatctctattacttcatctttgctcctactttgtgttatgaactcaactttcctcggtccccccgaatacgaaagcgctttctgctacgacgagttcttgagatgctcttttttacccagcttcaagtggggctgatccaacagtggatggtccctactatccagaactccatgaagcccttcaaggatatggactattcacggatcattgagcgtctcttaaagctggcggtccccaaccatctgatctggcttatcttcttctattggtttttccactcctgtctcaatgctgtggcagagcttctgcagtttggagaccgcgagttctacagagattggtggaatgctgagtctgtcacctacttttggcagaactggaatatccccgtgcacaagtggtgcatcagacacttctacaagcctatgctcagacatggcagcagcaaatgggtggccaggacaggagtatttttgacctcagccttcttccatgagtacctagtgagcgttcccctgcggatgttccgcctctgggcattcacagccatgatggctcaggtcccactggcctggattgtgggccgattcttccaagggaactatggcaatgcagctgtgtgggtgacactcatcattgggcaaccggtggctgtgctcatgtatgtccacgactactacgtgctcaactacgatgccccagtgggggtctgacttaagtttaaaccgctgatcagcctcgactgtgccttctagttgccagccatctgttgtttgcccctcccccgtgccttccttgaccctggaaggtgccactcccactgtcctttcctaataaaatgaggaaattgcatcgcattgtctgagtaggtgtcattctattctggggggtggggtggggcaggacagcaagggggaggattgggaagacaatagcaggcatgctggggatgcggtgggctctataattcacagtgtcgcgagttagactatgtaagcagaattttaatcatttttaaagagcccagtacttcatatccatttctcccgctccttctgcagccttatcaaaaggtattttagaacactcattttagccccattttcatttattatactggcttatccaacccctagacagagcattggcattttccctttcctgatcttagaagtctgatgactcatgaaaccagacagattagttacatacaccacaaatcgaggctgtagctggggcctcaacactgcagttcttttataactccttagtacactttttgttgatcctttgccttgatccttaattttcagtgtctatcacctctcccgtcaggtggtgttccacatttgggcctattctcagtccagggagttttacaacaatagatgtattgagaatccaacctaaagcttaactttccactcccatgaatgcctctctcctttttctccatttataaactgagctattaaccattaatggtttccaggtggatgtctcctccccc

SEQ ID NO: 231 - DNA, 4569 bp, synthetic construct
  source 1..4569: mol_type = other DNA
cattaacccagtctagtctcaaacatcctacatattgaaggttaaccatgaactgtgatccatctacctttattccctcacaactgggatgatggattgtgtcccactaggcctggctggatttattattaaggatctccgttttgagtacattctttattcagcttctactagtaggggaaaaaacaagcaacagtgcttccctgacaatatgagatttgtccaactccttctaacacctccacctgaggagaaatctcatttctgttgatttgtacaagaggatcttaattaccaatgattaaataattaccattttacttctagttttgctatgtagcccatgtgtcccagaatgcaacagttctccagtttttgtggtaatttgtgtgttctaaattactttttttaattagctgcagttttttaaatagaaagttagttgaggcccctaaaatatcatcctgcagaaatcagagttctgttgcagaaatggaattcagtagattactatgtgtctgtgaagaccctttagttatggggtggttaggaatgaagggaaacaatacaaaaacattagttataagcactcatctgtgactatatttcaaatatgtcctttctccttaaaacacaaacctatgagtccttgttatgtgtgccaaacacatctgctttactattgttctagcattcttattgacaaaatataaatttaaaagcaagattggaaaaataattctttggaaatattgaaaatcagatttaaacactgatcaaacacacttgtgagtgtgaaatgtgatgtagagttttggtgtgataagagaccatttctttgtaatgaacttaggaaaaaatattttcgtgatgatcttaggcttctatattctgtatactttagccaatagaatttttaaaatcatgtttttttcagtgaaagttcaaaatttaccagttgcccactcttgtctttgctcttcagtgacatgaaaataaggaaaatgaactttaagcctggaggatgtgtatttttatctaaaagaagactagaagatactaactgtaaaaattcccactactgtatttgtgggaagaaactggataaatttcctcattaagaagttcctattctctagaaagtataggaacttccccctctccctcccccccccctaacgttactggccgaagccgcttggaataaggccggtgtgcgtttgtctatatgttattttccaccatattgccgtcttttggcaatgtgagggcccggaaacctggccctgtcttcttgacgagcattcctaggggtctttcccctctcgccaaaggaatgcaaggtctgttgaatgtcgtgaaggaagcagttcctctggaagcttcttgaagacaaacaacgtctgtagcgaccctttgcaggcagcggaaccccccacctggcgacaggtgcctctgcggccaaaagccacgtgtataagatacacctgcaaaggcggcacaaccccagtgccacgttgtgagttggatagttgtggaaagagtcaaatggctctcctcaagcgtattcaacaaggggctgaaggatgcccagaaggtaccccattgtatgggatctgatctggggcctcggtacacatgctttacatgtgtttagtcgaggttaaaaaaacgtctaggccccccgaaccacggggacgtggttttcctttgaaaaacacgatgataatatggccacaaccaatttactgaccgtacaccaaaatttgcctgcattaccggtcgatgcaacgagtgatgaggttcgcaagaacctgatggacatgttcagggatcgccaggcgttttctgagcatacctggaaaatgcttctgtccgtttgccggtcgtgggcggcatggtgcaagttgaataaccggaaatggtttcccgcagaacctgaagatgttcgcgattatcttctatatcttcaggcgcgcggtctggcagtaaaaactatccagcaacatttgggccagctaaacatgcttcatcgtcggtccgggctgccacgaccaagtgacagcaatgctgtttcactggttatgcggcggatccgaaaagaaaacgttgatgccggtgaacgtgcaaaacaggctctagcgttcgaacgcactgatttcgaccaggttcgttcactcatggaaaatagcgatcgctgccaggatatacgtaatctggcatttctggggattgcttataacaccctgttacgtatagccgaaattgccaggatcagggttaaagatatctcacgtactgacggtgggagaatgttaatccatattggcagaacgaaaacgctggttagcaccgcaggtgtagagaaggcacttagcctgggggtaactaaactggtcgagcgatggatttccgtctctggtgtagctgatgatccgaataactacctgttttgccgggtcagaaaaaatggtgttgccgcgccatctgccaccagccagctatcaactcgcgccctggaagggatttttgaagcaactcatcgattgatttacggcgctaaggatgactctggtcagagatacctggcctggtctggacacagtgcccgtgtcggagccgcgcgagatatggcccgcgctggagtttcaataccggagatcatgcaagctggtggctggaccaatgtaaatattgtcatgaactatatccgtaacctggatagtgaaacaggggcaatggtgcgcctgctggaagatggcgatctcgagccatctgctggagacatgagagctgccaacctttggccaagcccgctcatgatcaaacgctctaagaagaacagcctggccttgtccctgacggccgaccagatggtcagtgccttgttggatgctgagccccccatactctattccgagtatgatcctaccagacccttcagtgaagcttcgatgatgggcttactgaccaacctggcagacagggagctggttcacatgatcaactgggcgaagagggtgccaggctttgtggatttgaccctccatgatcaggtccaccttctagaatgtgcctggctagagatcctgatgattggtctcgtctggcgctccatggagcacccagtgaagctactgtttgctcctaacttgctcttggacaggaaccagggaaaatgtgtagagggcatggtggagatcttcgacatgctgctggctacatcatctcggttccgcatgatgaatctgcagggagaggagtttgtgtgcctcaaatctattattttgcttaattctggagtgtacacatttctgtccagcaccctgaagtctctggaagagaaggaccatatccaccgagtcctggacaagatcacagacactttgatccacctgatggccaaggcaggcctgaccctgcagcagcagcaccagcggctggcccagctcctcctcatcctctcccacatcaggcacatgagtaacaaaggcatggagcatctgtacagcatgaagtgcaagaacgtggtgcccctctatgacctgctgctggaggcggcggacgcccaccgcctacatgcgcccactagccgtggaggggcatccgtggaggagacggaccaaagccacttggccactgcgggctctacttcatcgcattccttgcaaaagtattacatcacgggggaggcagagggtttccctgccacataagaagttcctattctctagaaagtataggaacttcctttccaccaaagttaaaggtaaaaatgaaatgtgttgatccttatttgtttcttgtaataattcatgactccaacaaataagtattttgattacagaacatagactgctgtgaatagagacaaagctgcaagagcattgggactgttctctggtatctaacttgcagaacagaggccatcttccttcctgttggagacaggacacatctactctggtgaaggggaccctttgccctaaagccttcagaattgtgttctttctgattttttaaactcctataaaactaaataaagaaccctcccctccccccaaaagaaacagcctgagtttccattaatgaaaagtcaaattgtctttttttgttgttgtttgtttttttgtttgtttgttctgcttttcaagacagggtttctctgtgtagccctgaatgtcctggaactcactgtgaagaccaggttggcttcgaattcagaaagcctcctgctctgcctcccaagatctaagatcaaaggtgtgtcccaccactgtcaagggaaacatgttgtcttaattgaaagttcaattatgagaagaaatgtcttgtaggctttgatttttcatattagttgattaccatttagttttgttttgatttttgtttcatgtggaggtttttctcaatgttatacatgtttcctttgtccataaaatataatatcaaatttggtaaacagttgcaatggtagttcaaagatatgtggaatatcatttacccagtcatcagttgtcttatctacccactttaattgatatataattttcgaccttataaaaatgg

SEQ ID NO: 232 - DNA, 3955 bp, synthetic construct
  source 1..3955: mol_type = other DNA
gggtaataaggtcgggggcgaggatgagttattggcttaagaaccaaagtcagggacaagcagggttaaggtgaagttcatcagtcctcagggatgaggagccaaagaactgagtggcacagtcctaaagacagagtttctctgtgtgacccaggtgagccttgaacttgagatccttctaccctactgcctgagaggctgggattgcaggcctggaccgctgaccctaggacttttgttttgtttttgttcagggtctcatatagctcaggttgacctcacactcattctgcagcgaagaatgatcttgaagttctgatcttcttgcctctgcctcccaagtgctgggattagaggtgtgcatcaccgtgcctggctcacggtgacaaagtgagggaccaggagtcaggagatcaagtggaggcctcaaactatagtcaggactggagttgaggttaagtttggacctggggtccagggtcctaggtcaggtgtctccagtgtgaagcacagggattggagtggcacggtaagagccagggttgaggtttgatgtctcagctggctcatcaggtcagggaacaagactgaggtcacagtactggggaccaggctcatgagcccgatggtgtgttccagccctggagagacccggaagatgatcagcacttggacctcagtgtgggtgaagatctgtgccagctgggcggggctgttcctctacctgtggaccctagtggcacccctgctcctgcccaacagagacttcagctgagaatgccctgctgcctgcctacctggtacgttactggccgaagccgcttggaataaggccggtgtgcgtttgtctatatgttattttccaccatattgccgtcttttggcaatgtgagggcccggaaacctggccctgtcttcttgacgagcattcctaggggtctttcccctctcgccaaaggaatgcaaggtctgttgaatgtcgtgaaggaagcagttcctctggaagcttcttgaagacaaacaacgtctgtagcgaccctttgcaggcagcggaaccccccacctggcgacaggtgcctctgcggccaaaagccacgtgtataagatacacctgcaaaggcggcacaaccccagtgccacgttgtgagttggatagttgtggaaagagtcaaatggctctcctcaagcgtattcaacaaggggctgaaggatgcccagaaggtaccccattgtatgggatctgatctggggcctcggtgcacatgctttacatgtgtttagtcgaggttaaaaaaacgtctaggccccccgaaccacggggacgtggttttcctttgaaaaacacgatgataatatatgcgcacaaccatgcccaagaagaagaggaaggtgacctctgatgaagtcaggaagaacctgatggacatgttcagggacaggcaggccttctctgaacacacctggaagatgctcctgtctgtgtgcagatcctgggctgcctggtgcaagctgaacaacaggaaatggttccctgctgaacctgaggatgtgagggactacctcctgtacctgcaagccagaggcctggctgtgaagaccatccaacagcacctgggccagctcaacatgctgcacaggagatctggcctgcctcgcccttctgactccaatgctgtgtccctggtgatgaggagaatcagaaaggagaatgtggatgctggggagagagccaagcaggccctggcctttgaacgcactgactttgaccaagtcagatccctgatggagaactctgacagatgccaggacatcaggaacctggccttcctgggcattgcctacaacaccctgctgcgcattgccgaaattgccagaatcagagtgaaggacatctcccgcaccgatggtgggagaatgctgatccacattggcaggaccaagaccctggtgtccacagctggtgtggagaaggccctgtccctgggggttaccaagctggtggagagatggatctctgtgtctggtgtggctgatgaccccaacaactacctgttctgccgggtcagaaagaatggtgtggctgccccttctgccacctcccaactgtccacccgggccctggaagggatctttgaggccacccaccgcctgatctatggtgccaaggatgactctgggcagagatacctggcctggtctggacactctgccagagtgggtgctgccagggacatggcgagggctggtgtgtccatccctgaaatcatgcaggctggtggctggaccaatgtgaacattgtgatgaactacatcagaaacctggactctgagactggggccatggtgaggctgctcgaggatggggacggaagcggagctactaacttcagcctgctgaagcaggctggagacgtggaggagaaccctggacctatgagctttccatgtaaatttgtagccagcttccttctgattttcaatgtttcttccaaaggtgcagtctccaaagagattacgaatgccttggaaacctggggtgccttgggtcaggacatcaacttggacattcctagttttcaaatgagtgatgatattgacgatataaaatgggaaaaaacttcagacaagaaaaagattgcacaattcagaaaagagaaagagactttcaaggaaaaagatacatataagctatttaaaaatggaactctgaaaattaagcatctgaagaccgatgatcaggatatctacaaggtatcaatatatgatacaaaaggaaaaaatgtgttggaaaaaatatttgatttgaagattcaagagagggtctcaaaaccaaaaatctcctggacttgtatcaacacaaccctgacctgtgaggtaatgaatggaactgaccccgaattaaacctgtatcaagatgggaaacatctaaaactttctcagagggtcatcacacacaagtggaccaccagcctgagtgcaaaattcaagtgcacagcagggaacaaagtcagcaaggaatccagtgtcgagcctgtcagctgtccagagaaaggtctggacatctatctcatcattggcatatgtggaggaggcagcctcttgatggtctttgtggcactgctcgttttctatatcaccaaaaggaaaaaacagaggtaggccttggggctcaacaagggtcagcccacccttggccacagctatctgctctcttccaggacccgctcaagtcaggattctccattctcagtgcctccagggtctgtgggacattatgctctgacccaagccctgccttcctttgcccatgatcatgcatacccacccttgggactgaagttaacccctgttctcagggtctccagaagagggcatgagagtagagagtggcccagagcttctcagctgacaggggggggggggtcaccctatacactaaggcctgtgggggtacccaccctatacactaaggcctgtgctccaggcctccagagcccacccccttcctagaccatgtgccttaatgagtctctaagacttcactcaataaacatgccagtacctgtgtgtgcctcccatgtcttgtgtgcctcacccctggtgtgaggaggccccgtgcctccttagccaacctgggagctggggcgtgcttggaatgagggtgttgaagagtatggtgagcaggacagaggacaggggtgatgagctagacaggacccttgtttacagtgtctgcttgggagctctgctcccctctgctctcctctgtcctgtatttgtagtctggacgtcatcactcacttctctaagcaagggccgccgtggtccttgggcttgatgtcatgggagtccagagaagacccacgacattcccaggccttaaaacagttgggaaaggacttgtgccctggagccaccaagcctgcctggctctaaggaggccagggctcctagc

SEQ ID NO: 233 - DNA, 3923 bp, synthetic construct
  source 1..3923: mol_type = other DNA
gccaaaataaaaggcacattgcatcagctgcctgaagaggatctcctgccagtcaagacccactttagatagagaaagcccctaaaaatagccatccatgtgcgggctcaacaggtgattggctctgagaggggaggagagcctctcgactgggtgaaggagacagagaaggacagtgccattcctagcctccctttgacaatggctctgcctctaaaggtcctgagccggagcatggccagcgcagccaaaggagaccatggaggggcaggaggtaagtggggccaggcctgactctgatttagtagcctagccgatctgttctctttgcccggcttccccctccttctgtctcctggctcctctctcctgatctaccaggcactgatctttcagacctctaggcccagggatagtttttgcctatgaatctactcacaccccacctttgctcctccagccaacacctggcgcctcctgacctttgtgctggctcttcccggcgtagccctctgctcccttaactgctggatgcacgctggccaccacgagcgcccagagttcatcccgtatcaccacctccgcatccgaaccaaggtacgccagaggatgagcgagtgagagcatgcagggggattgcggggagggactgtggtgggtgacctgtctgccttctctctgcagcccttcgcctggggggacggcaaccacacgcttttccacaatccccacgtcaatcctttgcccaccggttatgagcacccttgaacgttactggccgaagccgcttggaataaggccggtgtgcgtttgtctatatgttattttccaccatattgccgtcttttggcaatgtgagggcccggaaacctggccctgtcttcttgacgagcattcctaggggtctttcccctctcgccaaaggaatgcaaggtctgttgaatgtcgtgaaggaagcagttcctctggaagcttcttgaagacaaacaacgtctgtagcgaccctttgcaggcagcggaaccccccacctggcgacaggtgcctctgcggccaaaagccacgtgtataagatacacctgcaaaggcggcacaaccccagtgccacgttgtgagttggatagttgtggaaagagtcaaatggctctcctcaagcgtattcaacaaggggctgaaggatgcccagaaggtaccccattgtatgggatctgatctggggcctcggtgcacatgctttacatgtgtttagtcgaggttaaaaaaacgtctaggccccccgaaccacggggacgtggttttcctttgaaaaacacgatgataatatatgcgcacaaccatgcccaagaagaagaggaaggtgacctctgatgaagtcaggaagaacctgatggacatgttcagggacaggcaggccttctctgaacacacctggaagatgctcctgtctgtgtgcagatcctgggctgcctggtgcaagctgaacaacaggaaatggttccctgctgaacctgaggatgtgagggactacctcctgtacctgcaagccagaggcctggctgtgaagaccatccaacagcacctgggccagctcaacatgctgcacaggagatctggcctgcctcgcccttctgactccaatgctgtgtccctggtgatgaggagaatcagaaaggagaatgtggatgctggggagagagccaagcaggccctggcctttgaacgcactgactttgaccaagtcagatccctgatggagaactctgacagatgccaggacatcaggaacctggccttcctgggcattgcctacaacaccctgctgcgcattgccgaaattgccagaatcagagtgaaggacatctcccgcaccgatggtgggagaatgctgatccacattggcaggaccaagaccctggtgtccacagctggtgtggagaaggccctgtccctgggggttaccaagctggtggagagatggatctctgtgtctggtgtggctgatgaccccaacaactacctgttctgccgggtcagaaagaatggtgtggctgccccttctgccacctcccaactgtccacccgggccctggaagggatctttgaggccacccaccgcctgatctatggtgccaaggatgactctgggcagagatacctggcctggtctggacactctgccagagtgggtgctgccagggacatggcgagggctggtgtgtccatccctgaaatcatgcaggctggtggctggaccaatgtgaacattgtgatgaactacatcagaaacctggactctgagactggggccatggtgaggctgctcgaggatggggacggaagcggagctactaacttcagcctgctgaagcaggctggagacgtggaggagaaccctggacctatgagctttccatgtaaatttgtagccagcttccttctgattttcaatgtttcttccaaaggtgcagtctccaaagagattacgaatgccttggaaacctggggtgccttgggtcaggacatcaacttggacattcctagttttcaaatgagtgatgatattgacgatataaaatgggaaaaaacttcagacaagaaaaagattgcacaattcagaaaagagaaagagactttcaaggaaaaagatacatataagctatttaaaaatggaactctgaaaattaagcatctgaagaccgatgatcaggatatctacaaggtatcaatatatgatacaaaaggaaaaaatgtgttggaaaaaatatttgatttgaagattcaagagagggtctcaaaaccaaaaatctcctggacttgtatcaacacaaccctgacctgtgaggtaatgaatggaactgaccccgaattaaacctgtatcaagatgggaaacatctaaaactttctcagagggtcatcacacacaagtggaccaccagcctgagtgcaaaattcaagtgcacagcagggaacaaagtcagcaaggaatccagtgtcgagcctgtcagctgtccagagaaaggtctggacatctatctcatcattggcatatgtggaggaggcagcctcttgatggtctttgtggcactgctcgttttctatatcaccaaaaggaaaaaacagaggtagtgtctcagcagacacgctctgccagcaatcttcaaattggccttctgcacaccggctctgagagcccctgaggttccagtggacagttccaagctcaataaaggtgtggaagttttgtgtcctctggctctttgggaacagcatggtggaaggggctgggcaggctcttgggcagttggtatctgggttccagttatttttttttatataaggaaaatgtgatgtttccacctgcattttcattttattttttaaaaatttatacaagcaatacattgaatattgagcatattactcagtcttgtgttagttcttatccatatgtaaatttatgctgaccccattcctgctcttgcaaaaaaagtggatcagcactgaaatctgacacatgggcaaaccataaaaatctcccagctcaggaggtagggcatcatttctgggaagtttcccaggctagcccagagctgaagagaacttgttcccatgccagtagattcataggcaaaagcaaaaccaatctcgtaattgtggagatatacaggaaagtagattcctaggacgtgagatgtggaggagtctcatggttggaatctgcctggccggctgggtcaggatctgcagatggtagatccagcatctctttatactgacgtttgaagaagccaagctataaaatgtagtaaagtcagaaaaactgggtaagagggaagttgaagatgagagaactaaaataacttccagctgtgtgtcagggcagccatgtgaatggccctcacgtacagagaaaggccatgtgcc

SEQ ID NO: 234 - DNA, 4439 bp, synthetic construct
  source 1..4439: mol_type = other DNA
ctaagaagccactgtcctccaatctgggggaaactgggaccagtggagatggcagacaccctggctacagcgtcagggtaatgacaccccccctcaaatgaggctctgcaaggagatagaataacctaaaagactgtctggcgccagctatgcagggccacccatgccagccttgcgggaaagcagctgacctttactgtagaagcctcctttccttcctccctccctcacgcccttctccctccttgaatcacagcgcctaccctagtcctgactgttgctcaatccaggagcacagttcctgtgggctgagcctgactggcttggtcatctcttttctgcacttcaagggaaaagcaagatcttgcacaaggtcccctccggctggctgctggcaaaggaaaggtgccatgaatttactgaccgtacaccaaaatttgcctgcattaccggtcgatgcaacgagtgatgaggttcgcaagaacctgatggacatgttcagggatcgccaggcgttttctgagcatacctggaaaatgcttctgtccgtttgccggtcgtgggcggcatggtgcaagttgaataaccggaaatggtttcccgcagaacctgaagatgttcgcgattatcttctatatcttcaggcgcgcggtctggcagtaaaaactatccagcaacatttgggccagctaaacatgcttcatcgtcggtccgggctgccacgaccaagtgacagcaatgctgtttcactggttatgcggcggatccgaaaagaaaacgttgatgccggtgaacgtgcaaaacaggctctagcgttcgaacgcactgatttcgaccaggttcgttcactcatggaaaatagcgatcgctgccaggatatacgtaatctggcatttctggggattgcttataacaccctgttacgtatagccgaaattgccaggatcagggttaaagatatctcacgtactgacggtgggagaatgttaatccatattggcagaacgaaaacgctggttagcaccgcaggtgtagagaaggcacttagcctgggggtaactaaactggtcgagcgatggatttccgtctctggtgtagctgatgatccgaataactacctgttttgccgggtcagaaaaaatggtgttgccgcgccatctgccaccagccagctatcaactcgcgccctggaagggatttttgaagcaactcatcgattgatttacggcgctaaggatgactctggtcagagatacctggcctggtctggacacagtgcccgtgtcggagccgcgcgagatatggcccgcgctggagtttcaataccggagatcatgcaagctggtggctggaccaatgtaaatattgtcatgaactatatccgtaacctggatagtgaaacaggggcaatggtgcgcctgctggaagatggcgatctcgagccatctgctggagacatgagagctgccaacctttggccaagcccgctcatgatcaaacgctctaagaagaacagcctggccttgtccctgacggccgaccagatggtcagtgccttgttggatgctgagccccccatactctattccgagtatgatcctaccagacccttcagtgaagcttcgatgatgggcttactgaccaacctggcagacagggagctggttcacatgatcaactgggcgaagagggtgccaggctttgtggatttgaccctccatgatcaggtccaccttctagaatgtgcctggctagagatcctgatgattggtctcgtctggcgctccatggagcacccagtgaagctactgtttgctcctaacttgctcttggacaggaaccagggaaaatgtgtagagggcatggtggagatcttcgacatgctgctggctacatcatctcggttccgcatgatgaatctgcagggagaggagtttgtgtgcctcaaatctattattttgcttaattctggagtgtacacatttctgtccagcaccctgaagtctctggaagagaaggaccatatccaccgagtcctggacaagatcacagacactttgatccacctgatggccaaggcaggcctgaccctgcagcagcagcaccagcggctggcccagctcctcctcatcctctcccacatcaggcacatgagtaacaaaggcatggagcatctgtacagcatgaagtgcaagaacgtggtgcccctctatgacctgctgctggaggcggcggacgcccaccgcctacatgcgcccactagccgtggaggggcatccgtggaggagacggaccaaagccacttggccactgcgggctctacttcatcgcattccttgcaaaagtattacatcacgggggaggcagagggtttccctgccacaggaagcggagctactaacttcagcctgctgaagcaggctggagacgtggaggagaaccctggacctatggtgagcaagggcgaggaggtcatcaaagagttcatgcgcttcaaggtgcgcatggagggctccatgaacggccacgagttcgagatcgagggcgagggcgagggccgcccctacgagggcacccagaccgccaagctgaaggtgaccaagggcggccccctgcccttcgcctgggacatcctgtccccccagttcatgtacggctccaaggcgtacgtgaagcaccccgccgacatccccgattacaagaagctgtccttccccgagggcttcaagtgggagcgcgtgatgaacttcgaggacggcggtctggtgaccgtgacccaggactcctccctgcaggacggcacgctgatctacaaggtgaagatgcgcggcaccaacttcccccccgacggccccgtaatgcagaagaagaccatgggctgggaggcctccaccgagcgcctgtacccccgcgacggcgtgctgaagggcgagatccaccaggccctgaagctgaaggacggcggccactacctggtggagttcaagaccatctacatggccaagaagcccgtgcaactgcccggctactactacgtggacaccaagctggacatcacctcccacaacgaggactacaccatcgtggaacagtacgagcgctccgagggccgccaccacctgttcctggggcatggcaccggcagcaccggcagcggcagctccggcaccgcctcctccgaggacaacaacatggccgtcatcaaagagttcatgcgcttcaaggtgcgcatggagggctccatgaacggccacgagttcgagatcgagggcgagggcgagggccgcccctacgagggcacccagaccgccaagctgaaggtgaccaagggcggccccctgcccttcgcctgggacatcctgtccccccagttcatgtacggctccaaggcgtacgtgaagcaccccgccgacatccccgattacaagaagctgtccttccccgagggcttcaagtgggagcgcgtgatgaacttcgaggacggcggtctggtgaccgtgacccaggactcctccctgcaggacggcacgctgatctacaaggtgaagatgcgcggcaccaacttcccccccgacggccccgtaatgcagaagaagaccatgggctgggaggcctccaccgagcgcctgtacccccgcgacggcgtgctgaagggcgagatccaccaggccctgaagctgaaggacggcggccactacctggtggagttcaagaccatctacatggccaagaagcccgtgcaactgcccggctactactacgtggacaccaagctggacatcacctcccacaacgaggactacaccatcgtggaacagtacgagcgctccgagggccgccaccacctgttcctgtacggcatggacgagctgtacaagggctccggtgagggcagaggaagtctgctaacatgcggtgacgtcgaggagaatcctggcccaatgggacctctccaccagtttctcctgctgctgatcacaggtgggaccacaggagggacctaccttcagcaacactgtcttttcctcaccttccttgagcagatggctggggtgtgggggcagggtggcatggagggggaactattatggaggctggagtcctggtacactccagtgtcctgctttgactctgcttttctcccccactggctcattcgtgttcttcacacatcctccccgagattaatatccacctataggaagggtaacaggggcagctggaattagtcactgaaggagctgtgagggtggcactagttgtgaggtaggggactcgttaagacactgccaagagcccttaaacactcaagaagcacttaaaccataagtggaggggcagaatgggagagaagagagaaagacagactaggatttgcatcttcctggaggtcctcccagattcgacctcagcgctctgtgggaggtgaggatgctgta

SEQ ID NO: 235 - DNA, 4439 bp, synthetic construct
  source 1..4439: mol_type = other DNA
catttggaaggtggtaggtagcttgttcaaggtaacggaaccaggactaggctttatagagcccatgagatctgcagagcctttgaggttggcttcccccacataccagccccagaaataacaaacttctatgtgactgattatctttgtcagagaattgtagtgtctagacctcactgagtctagataaaattaggactgcacatattcaggacctctgggaaagtccatgtgtaggaagaagccccgcccccttccggagacgatttgggatggtttgctgggatgtgggcttctgtggttcaggctgtctttcaccttcactctgccttgcacatctccttagacaatctgatgcatgtgtctgcacagccctttgctgggtctctgcatcctaacttcttctcattccctttacacacagtcttacccagcactttcggctccggtgagggcagaggaagtctgctaacatgcggtgacgtcgaggagaatcctggcccaatgaatttactgaccgtacaccaaaatttgcctgcattaccggtcgatgcaacgagtgatgaggttcgcaagaacctgatggacatgttcagggatcgccaggcgttttctgagcatacctggaaaatgcttctgtccgtttgccggtcgtgggcggcatggtgcaagttgaataaccggaaatggtttcccgcagaacctgaagatgttcgcgattatcttctatatcttcaggcgcgcggtctggcagtaaaaactatccagcaacatttgggccagctaaacatgcttcatcgtcggtccgggctgccacgaccaagtgacagcaatgctgtttcactggttatgcggcggatccgaaaagaaaacgttgatgccggtgaacgtgcaaaacaggctctagcgttcgaacgcactgatttcgaccaggttcgttcactcatggaaaatagcgatcgctgccaggatatacgtaatctggcatttctggggattgcttataacaccctgttacgtatagccgaaattgccaggatcagggttaaagatatctcacgtactgacggtgggagaatgttaatccatattggcagaacgaaaacgctggttagcaccgcaggtgtagagaaggcacttagcctgggggtaactaaactggtcgagcgatggatttccgtctctggtgtagctgatgatccgaataactacctgttttgccgggtcagaaaaaatggtgttgccgcgccatctgccaccagccagctatcaactcgcgccctggaagggatttttgaagcaactcatcgattgatttacggcgctaaggatgactctggtcagagatacctggcctggtctggacacagtgcccgtgtcggagccgcgcgagatatggcccgcgctggagtttcaataccggagatcatgcaagctggtggctggaccaatgtaaatattgtcatgaactatatccgtaacctggatagtgaaacaggggcaatggtgcgcctgctggaagatggcgatctcgagccatctgctggagacatgagagctgccaacctttggccaagcccgctcatgatcaaacgctctaagaagaacagcctggccttgtccctgacggccgaccagatggtcagtgccttgttggatgctgagccccccatactctattccgagtatgatcctaccagacccttcagtgaagcttcgatgatgggcttactgaccaacctggcagacagggagctggttcacatgatcaactgggcgaagagggtgccaggctttgtggatttgaccctccatgatcaggtccaccttctagaatgtgcctggctagagatcctgatgattggtctcgtctggcgctccatggagcacccagtgaagctactgtttgctcctaacttgctcttggacaggaaccagggaaaatgtgtagagggcatggtggagatcttcgacatgctgctggctacatcatctcggttccgcatgatgaatctgcagggagaggagtttgtgtgcctcaaatctattattttgcttaattctggagtgtacacatttctgtccagcaccctgaagtctctggaagagaaggaccatatccaccgagtcctggacaagatcacagacactttgatccacctgatggccaaggcaggcctgaccctgcagcagcagcaccagcggctggcccagctcctcctcatcctctcccacatcaggcacatgagtaacaaaggcatggagcatctgtacagcatgaagtgcaagaacgtggtgcccctctatgacctgctgctggaggcggcggacgcccaccgcctacatgcgcccactagccgtggaggggcatccgtggaggagacggaccaaagccacttggccactgcgggctctacttcatcgcattccttgcaaaagtattacatcacgggggaggcagagggtttccctgccacaggaagcggagctactaacttcagcctgctgaagcaggctggagacgtggaggagaaccctggacctatggtgagcaagggcgaggaggtcatcaaagagttcatgcgcttcaaggtgcgcatggagggctccatgaacggccacgagttcgagatcgagggcgagggcgagggccgcccctacgagggcacccagaccgccaagctgaaggtgaccaagggcggccccctgcccttcgcctgggacatcctgtccccccagttcatgtacggctccaaggcgtacgtgaagcaccccgccgacatccccgattacaagaagctgtccttccccgagggcttcaagtgggagcgcgtgatgaacttcgaggacggcggtctggtgaccgtgacccaggactcctccctgcaggacggcacgctgatctacaaggtgaagatgcgcggcaccaacttcccccccgacggccccgtaatgcagaagaagaccatgggctgggaggcctccaccgagcgcctgtacccccgcgacggcgtgctgaagggcgagatccaccaggccctgaagctgaaggacggcggccactacctggtggagttcaagaccatctacatggccaagaagcccgtgcaactgcccggctactactacgtggacaccaagctggacatcacctcccacaacgaggactacaccatcgtggaacagtacgagcgctccgagggccgccaccacctgttcctggggcatggcaccggcagcaccggcagcggcagctccggcaccgcctcctccgaggacaacaacatggccgtcatcaaagagttcatgcgcttcaaggtgcgcatggagggctccatgaacggccacgagttcgagatcgagggcgagggcgagggccgcccctacgagggcacccagaccgccaagctgaaggtgaccaagggcggccccctgcccttcgcctgggacatcctgtccccccagttcatgtacggctccaaggcgtacgtgaagcaccccgccgacatccccgattacaagaagctgtccttccccgagggcttcaagtgggagcgcgtgatgaacttcgaggacggcggtctggtgaccgtgacccaggactcctccctgcaggacggcacgctgatctacaaggtgaagatgcgcggcaccaacttcccccccgacggccccgtaatgcagaagaagaccatgggctgggaggcctccaccgagcgcctgtacccccgcgacggcgtgctgaagggcgagatccaccaggccctgaagctgaaggacggcggccactacctggtggagttcaagaccatctacatggccaagaagcccgtgcaactgcccggctactactacgtggacaccaagctggacatcacctcccacaacgaggactacaccatcgtggaacagtacgagcgctccgagggccgccaccacctgttcctgtacggcatggacgagctgtacaagtgaagatctagagaccagagaccatcagacctcctactttctgcactgggcctcacagccctcacggtctgcagctcccagtggacttccagacttcagctgtggcttatcattcaagaggactcaaaactatattaatctgctctgagataatgttccaaaagctccaaagaaagcccgagtcccttgcccccagaggccaagcttggaaaaattgttcccctgtccaggttccctgcctttctagctccttcttgctatctccttgggcagacgtgcgcagaggtggcgcaagtgaggatcacatacatgtgcctgggcttccatctggtagaatgtggtctaacaaagcacatacaacaaaagaaactctcagtgcgtgttcatttcttgacatgggatgaaattagtttttaaaaaaaaattaaaccattttcttaaattatagatataaagcaaattagaaa

SEQ ID NO: 236 - DNA, 3444 bp, synthetic construct
  source 1..3444: mol_type = other DNA
ggaccatggtaatgtgcaccataactttcattcattttattttattggttatttggaaacagcactatatattaccctgctgtcttgaaagtcactatgtagactaggttggtctacatcatagaatactagagcctaaaatcacacagataaacctgcctctggcttcaaagtgttggtactgaagatttgcaccactacacccagctctcaaacctctcatgaaacaataaaatcagtaacccagagttccaagtccaaaaaggtaataattttggcattctcaaaaaaaaagtatttatatctgcagagagcctgcagcccttgtggctatcaacggcaaagaatttctactaactgctggtttctagggtaaccttggactagaggtatatgaccttgtttagagcagtggattgggggtcactggctcctccaccttcctttcacaccccttcaccattgcccctgaccttgccatctgccttaggtcaccataacactaacagctccaggagcaacaggacctgccccacccaatctcagacctgggaaggtatccaaggtgacctagggcccacaggagagcaggtgcaacagggccctcccctcccacagccatgagggtgggagaagggagtacaactctgtcaggaagggcagggctttggccaacatctggctgccaacacggcaggggtggggctgtgggggagaatgagggtttttaaaggctccccaggagcctctacagctccaagatcactgcctgcagctcctggactcctgttaccatgcccaagaagaagaggaaggtgacctctgatgaagtcaggaagaacctgatggacatgttcagggacaggcaggccttctctgaacacacctggaagatgctcctgtctgtgtgcagatcctgggctgcctggtgcaagctgaacaacaggaaatggttccctgctgaacctgaggatgtgagggactacctcctgtacctgcaagccagaggcctggctgtgaagaccatccaacagcacctgggccagctcaacatgctgcacaggagatctggcctgcctcgcccttctgactccaatgctgtgtccctggtgatgaggagaatcagaaaggagaatgtggatgctggggagagagccaagcaggccctggcctttgaacgcactgactttgaccaagtcagatccctgatggagaactctgacagatgccaggacatcaggaacctggccttcctgggcattgcctacaacaccctgctgcgcattgccgaaattgccagaatcagagtgaaggacatctcccgcaccgatggtgggagaatgctgatccacattggcaggaccaagaccctggtgtccacagctggtgtggagaaggccctgtccctgggggttaccaagctggtggagagatggatctctgtgtctggtgtggctgatgaccccaacaactacctgttctgccgggtcagaaagaatggtgtggctgccccttctgccacctcccaactgtccacccgggccctggaagggatctttgaggccacccaccgcctgatctatggtgccaaggatgactctgggcagagatacctggcctggtctggacactctgccagagtgggtgctgccagggacatggcgagggctggtgtgtccatccctgaaatcatgcaggctggtggctggaccaatgtgaacattgtgatgaactacatcagaaacctggactctgagactggggccatggtgaggctgctcgaggatggggacggaagcggagctactaacttcagcctgctgaagcaggctggagacgtggaggagaaccctggacctatgagctttccatgtaaatttgtagccagcttccttctgattttcaatgtttcttccaaaggtgcagtctccaaagagattacgaatgccttggaaacctggggtgccttgggtcaggacatcaacttggacattcctagttttcaaatgagtgatgatattgacgatataaaatgggaaaaaacttcagacaagaaaaagattgcacaattcagaaaagagaaagagactttcaaggaaaaagatacatataagctatttaaaaatggaactctgaaaattaagcatctgaagaccgatgatcaggatatctacaaggtatcaatatatgatacaaaaggaaaaaatgtgttggaaaaaatatttgatttgaagattcaagagagggtctcaaaaccaaaaatctcctggacttgtatcaacacaaccctgacctgtgaggtaatgaatggaactgaccccgaattaaacctgtatcaagatgggaaacatctaaaactttctcagagggtcatcacacacaagtggaccaccagcctgagtgcaaaattcaagtgcacagcagggaacaaagtcagcaaggaatccagtgtcgagcctgtcagctgtccagagaaaggtctggacatctatctcatcattggcatatgtggaggaggcagcctcttgatggtctttgtggcactgctcgttttctatatcaccaaaaggaaaaaacagaggggaagcggagagggcagaggaagtcttctaacatgcggtgacgtggaggagaatcccggccctatgaggttcctgatcctgttcctagccctgtccctaggagggattggtgagataagggaagggggagggaacagagccctgactctcctgctgcctttggccctagacatccctttcccccttgcccctcaccccagctacatcatgagtacctgctcctccttctctgccctgtacactgccaggtccctcacattcctttttcccaggaaaggcccctgttccttcccattttccagaactttctcctcttccttagacacctgatcatttctgagcttctccagtctttctaaggaacccaacctcttaccaaccttaggacctcagatgtcgctcaagttcattgcttttcctagagcctcatagcccaaaccttgaatcagaggcttgtctaaatcccccaatagcaccttaggcagttgcagcagctgccagccttcagctgtgttgtccacatgctgacaactggtcccccatcatcccaagttgctcagtttctaccaaaactttcacttctcaaattggcttgtgacataagatggtcccccctgccccctgctttctggtgtggggaaaatgtccatgtcccttctcaatggcttttttggtttagtctgggttttgtaagaggagtcaggtagcagacgccagatgtggatattaagtatcttaaccaatcactcgccacctgagactgggtctctcactgtatagagagttcctgttaggctaagatggctgtccagcaagcctcgggggaatcctcctgtttccacctccccagctctggggttac

SEQ ID NO: 237 - DNA, 4519 bp, synthetic construct
  source 1..4519: mol_type = other DNA
aacctcccacacctccccctgaacctgaaacataaaatgaatgcaattgttgttgttaacttgtttattgcagcttataatggttacaaataaagcaatagcatcacaaatttcacaaataaagcatttttttcactgcattctagttgtggtttgtccaaactcatcaatgtatcttatcatgtctggatctgcgactctagaggatcataatcagccataccacatttgtagaggttttacttgctttaaaaaacctcccacacctccccctgaacctgaaacataaaatgaatgcaattgttgttgttaacttgtttattgcagcttataatggttacaaataaagcaatagcatcacaaatttcacaaataaagcatttttttcactgcattctagttgtggtttgtccaaactcatcaatgtatcttatcatgtctggatctgcgactctagaggatcataatcagccataccacatttgtagaggttttacttgctttaaaaaacctcccacacctccccctgaacctgaaacataaaatgaatgcaattgttgttgttaacttgtttattgcagcttataatggttacaaataaagcaatagcatcacaaatttcacaaataaagcatttttttcactgcattctagttgtggtttgtccaaactcatcaatgtatcttatcatgtctggatccccatcaagctgatccggaacccttaatataacttcgtataatgtatgctatacgaagttattaggtccctcgacctgcagcccaagctagatcgaatttctagactcgagtggatccgccaccatgggcagcagcctggacgacgagcacatcctgagcgccctgctgcagagcgacgacgagctggtcggcgaggacagcgacagcgaggtgagcgaccacgtgagcgaggacgacgtgcagtccgacaccgaggaggccttcatcgacgaggtgcacgaggtgcagcctaccagcagcggctccgagatcctggacgagcagaacgtgatcgagcagcccggcagctccctggccagcaacaggatcctgaccctgccccagaggaccatcaggggcaagaacaagcactgctggtccacctccaagcccaccaggcggagcagggtgtccgccctgaacatcgtgagaagccagaggggccccaccaggatgtgcaggaacatctacgaccccctgctgtgcttcaagctgttcttcaccgacgagatcatcagcgagatcgtgaagtggaccaacgccgagatcagcctgaagaggcgggagagcatgacctccgccaccttcagggacaccaacgaggacgagatctacgccttcttcggcatcctggtgatgaccgccgtgaggaaggacaaccacatgagcaccgacgacctgttcgacagatccctgagcatggtgtacgtgagcgtgatgagcagggacagattcgacttcctgatcagatgcctgaggatggacgacaagagcatcaggcccaccctgcgggagaacgacgtgttcacccccgtgagaaagatctgggacctgttcatccaccagtgcatccagaactacacccctggcgcccacctgaccatcgacgagcagctgctgggcttcaggggcaggtgccccttcagggtctatatccccaacaagcccagcaagtacggcatcaagatcctgatgatgtgcgacagcggcaccaagtacatgatcaacggcatgccctacctgggcaggggcacccagaccaacggcgtgcccctgggcgagtactacgtgaaggagctgtccaagcccgtccacggcagctgcagaaacatcacctgcgacaactggttcaccagcatccccctggccaagaacctgctgcaggagccctacaagctgaccatcgtgggcaccgtgagaagcaacaagagagagatccccgaggtcctgaagaacagcaggtccaggcccgtgggcaccagcatgttctgcttcgacggccccctgaccctggtgtcctacaagcccaagcccgccaagatggtgtacctgctgtccagctgcgacgaggacgccagcatcaacgagagcaccggcaagccccagatggtgatgtactacaaccagaccaagggcggcgtggacaccctggaccagatgtgcagcgtgatgacctgcagcagaaagaccaacaggtggcccatggccctgctgtacggcatgatcaacatcgcctgcatcaacagcttcatcatctacagccacaacgtgagcagcaagggcgagaaggtgcagagccggaaaaagttcatgcggaacctgtacatgggcctgacctccagcttcatgaggaagaggctggaggcccccaccctgaagagatacctgagggacaacatcagcaacatcctgcccaaagaggtgcccggcaccagcgacgacagcaccgaggagcccgtgatgaagaagaggacctactgcacctactgtcccagcaagatcagaagaaaggccagcgccagctgcaagaagtgtaagaaggtcatctgccgggagcacaacatcgacatgtgccagagctgtttcgcggccgccaagctgggcggcggcgcccccgccgtgggcggcggccccaaggccgccgataaaggggccgcaggctacccatacgatgttcctgactatgcgggctatccctatgacgtcccggactatgctgctagctatccatatgacgttccagattacgctggaagcggagctggagacatgagagctgccaacctttggccaagcccgctcatgatcaaacgctctaagaagaacagcctggccttgtccctgacggccgaccagatggtcagtgccttgttggatgctgagccccccatactctattccgagtatgatcctaccagacccttcagtgaagcttcgatgatgggcttactgaccaacctggcagacagggagctggttcacatgatcaactgggcgaagagggtgccaggctttgtggatttgaccctccatgatcaggtccaccttctagaatgtgcctggctagagatcctgatgattggtctcgtctggcgctccatggagcacccagtgaagctactgtttgctcctaacttgctcttggacaggaaccagggaaaatgtgtagagggcatggtggagatcttcgacatgctgctggctacatcatctcggttccgcatgatgaatctgcagggagaggagtttgtgtgcctcaaatctattattttgcttaattctggagtgtacacatttctgtccagcaccctgaagtctctggaagagaaggaccatatccaccgagtcctggacaagatcacagacactttgatccacctgatggccaaggcaggcctgaccctgcagcagcagcaccagcggctggcccagctcctcctcatcctctcccacatcaggcacatgagtaacaaaggcatggagcatctgtacagcatgaagtgcaagaacgtggtgcccctctatgacctgctgctggaggcggcggacgcccaccgcctacatgcgcccactagccgtggaggggcatccgtggaggagacggaccaaagccacttggccactgcgggctctacttcatcgcattccttgcaaaagtattacatcacgggggaggcagagggtttccctgccacagcttaacttaagtttaaaccgctgatcagcctcgactgtgccttctagttgccagccatctgttgtttgcccctcccccgtgccttccttgaccctggaaggtgccactcccactgtcctttcctaataaaatgaggaaattgcatcgcattgtctgagtaggtgtcattctattctggggggtggggtggggcaggacagcaagggggaggattgggaagacaatagcaggcatgctggggatgcggtgggctctataattcacagtgtcgcgagttagactatgtaagcagaattttaatcatttttaaagagcccagtacttcatatccatttctcccgctccttctgcagccttatcaaaaggtattttagaacactcattttagccccattttcatttattatactggcttatccaacccctagacagagcattggcattttccctttcctgatcttagaagtctgatgactcatgaaaccagacagattagttacatacaccacaaatcgaggctgtagctggggcctcaacactgcagttcttttataactccttagtacactttttgttgatcctttgccttgatccttaattttcagtgtctatcacctctcccgtcaggtggtgttccacatttgggcctattctcagtccagggagttttacaacaatagatgtattgagaatccaacctaaagcttaactttccactcccatgaatgcctctctcctttttctccatttataaactgagctattaaccattaatggtttccaggtggatgtctcctccccc

SEQ ID NO: 238 - DNA, 3469 bp, synthetic construct
  source 1..3469: mol_type = other DNA
gtccacacagagctgaatcattcccaacactgaattaagcactgctgctaagaggatgaagatggtagtgtcactatctgtgtcccagactagcagtcttgtttccaaaggcctttctgaaggaccaacccatcctacagatcctacagagggtatttgcctgatgatactgccgctatcgtttcctcagcccaggatagcatcatgtgtaggaggaatttgggtgtggtgagggcagcctcccggttgtaccacactggttatggctgttgacagtccacagggtctcagtgccacaagacaccacccaagacagattcctgttacttacctttggaacatccctacccctgatgtcacttggtgaagagggcctggggtactcaggagaggggatttcgagcctggcctctgcccatgagctccacgaagctccccagctagaactcccctggcgagtggaaacagcttttaccgcggctgtagctgtggttttggaattttccaacgccccctgtgattggctgccccgcccctcacaccctgccccagacccagattggccacgtggggtgcctgtcatcatacccaatgcacctctgggggttggggggctgtcacttggccacctgtgtggagcagagcttaaacccccctgcccagaaacactgggggagagctttgtgcagatctaagggctgaggcacccgctgagagggcttcaccccacctccactgccagctgtgtgctgtcctgggctaccctactgaggaggacagggagccaagttctcagtcatgcccaagaagaagaggaaggtgacctctgatgaagtcaggaagaacctgatggacatgttcagggacaggcaggccttctctgaacacacctggaagatgctcctgtctgtgtgcagatcctgggctgcctggtgcaagctgaacaacaggaaatggttccctgctgaacctgaggatgtgagggactacctcctgtacctgcaagccagaggcctggctgtgaagaccatccaacagcacctgggccagctcaacatgctgcacaggagatctggcctgcctcgcccttctgactccaatgctgtgtccctggtgatgaggagaatcagaaaggagaatgtggatgctggggagagagccaagcaggccctggcctttgaacgcactgactttgaccaagtcagatccctgatggagaactctgacagatgccaggacatcaggaacctggccttcctgggcattgcctacaacaccctgctgcgcattgccgaaattgccagaatcagagtgaaggacatctcccgcaccgatggtgggagaatgctgatccacattggcaggaccaagaccctggtgtccacagctggtgtggagaaggccctgtccctgggggttaccaagctggtggagagatggatctctgtgtctggtgtggctgatgaccccaacaactacctgttctgccgggtcagaaagaatggtgtggctgccccttctgccacctcccaactgtccacccgggccctggaagggatctttgaggccacccaccgcctgatctatggtgccaaggatgactctgggcagagatacctggcctggtctggacactctgccagagtgggtgctgccagggacatggcgagggctggtgtgtccatccctgaaatcatgcaggctggtggctggaccaatgtgaacattgtgatgaactacatcagaaacctggactctgagactggggccatggtgaggctgctcgaggatggggacggaagcggagctactaacttcagcctgctgaagcaggctggagacgtggaggagaaccctggacctatgagctttccatgtaaatttgtagccagcttccttctgattttcaatgtttcttccaaaggtgcagtctccaaagagattacgaatgccttggaaacctggggtgccttgggtcaggacatcaacttggacattcctagttttcaaatgagtgatgatattgacgatataaaatgggaaaaaacttcagacaagaaaaagattgcacaattcagaaaagagaaagagactttcaaggaaaaagatacatataagctatttaaaaatggaactctgaaaattaagcatctgaagaccgatgatcaggatatctacaaggtatcaatatatgatacaaaaggaaaaaatgtgttggaaaaaatatttgatttgaagattcaagagagggtctcaaaaccaaaaatctcctggacttgtatcaacacaaccctgacctgtgaggtaatgaatggaactgaccccgaattaaacctgtatcaagatgggaaacatctaaaactttctcagagggtcatcacacacaagtggaccaccagcctgagtgcaaaattcaagtgcacagcagggaacaaagtcagcaaggaatccagtgtcgagcctgtcagctgtccagagaaaggtctggacatctatctcatcattggcatatgtggaggaggcagcctcttgatggtctttgtggcactgctcgttttctatatcaccaaaaggaaaaaacagaggggaagcggagagggcagaggaagtcttctaacatgcggtgacgtggaggagaatcccggccctatgcgaagtaagtgaatgggcgcatccggtcatgggggagcctgggtcctgtcaccattcctaggcccgctgaataggagtgtatcttggaaaccgtgcctctttggcagggtgtgtcccagtcaaggtcaagatctgctgggagatgggtggagtcccaagagagttactcttccctggcagcttccttggcagcaatggtaatcaaattattgaggagttcctgacataagttctgaagttctgggaagactgagcatgcccaagggtccaaccctttgatttacaaagagaccaagacccaagaggggagtgcatcactgaagagctcaccattagggcctgggagctggtggagtctggtagacattaggacccacagcttatattccttgttcctagtgaagagtttatctttgtgcctccaactgcaggcactgctgtaccctgaggcaggagtcacagtaaactgaggtcagcaggcagtggggatcagaactcatcatctccctgattccctaaccttaaacacacacacgcacacactcataccagggcctgatggctcagtacaatccagctagggactgctctgtgtgtgctatgtgtatatttgtgtgtgtgtttgcatatgcttcaggtgcagttgatcatctatagcaagaagagatgggagcagaaaaccttggtctcactcctttccctgcttgaaaccatgggcccacagctgctgggcagatgtcaggggccctttaggcttccagctgagcaatgtgggggatccgatcctccctgctcatgtaagggaagccagaggacc

SEQ ID NO: 239 - DNA, 2965 bp, synthetic construct
  source 1..2965: mol_type = other DNA
caagcgacccatgcttctttgtagctttctgtttgagtaaatggaagtctggtcattctctattaattcgaagtatgtcaaaattcagcatcattccacgaattagagttcatatctctaccctgtgatttttaactgaatgtctttgaaatcagggctatcgtttactggctgattctttgtttcagaggaccttataatgtccttcaccgtatccgtggcgattgggcttgcaatcggaggatttctctgggcgctgttcgtttttctgtctcgaagaagaagagccagtgcacccatttcgcagtggagtcccaccaggagacccaggtcttcctacaaccacggcctcaacaggactgggttctaccgccacagtggctatgaacggcgaagcaacctcagcctggccagcctcactttccagagacaagcttccatggagctggtcaactccttcccaaggaaatcaagctttagggcttcgactttccatcccttcctgcaatgcccaccacttccggtggaaacggagagtcagctgatgaccctgtctgcctccaccaccccttccaccctcagcaccgcacacagcccgagccggccagacttccgctggtccagcaacagcttgcggatgggcctttccacaccgcccccacctgcctatgaatccatcataaaggcatttcccgattccggaagcggagagggcagaggaagtctgctaacatgcggtgacgtcgaggagaatcctggcccagcggatcccgccaccatggtgagcaagggcgaggaggtcatcaaagagttcatgcgcttcaaggtgcgcatggagggctccatgaacggccacgagttcgagatcgagggcgagggcgagggccgcccctacgagggcacccagaccgccaagctgaaggtgaccaagggcggccccctgcccttcgcctgggacatcctgtccccccagttcatgtacggctccaaggcgtacgtgaagcaccccgccgacatccccgattacaagaagctgtccttccccgagggcttcaagtgggagcgcgtgatgaacttcgaggacggcggtctggtgaccgtgacccaggactcctccctgcaggacggcacgctgatctacaaggtgaagatgcgcggcaccaacttcccccccgacggccccgtaatgcagaagaagaccatgggctgggaggcctccaccgagcgcctgtacccccgcgacggcgtgctgaagggcgagatccaccaggccctgaagctgaaggacggcggccactacctggtggagttcaagaccatctacatggccaagaagcccgtgcaactgcccggctactactacgtggacaccaagctggacatcacctcccacaacgaggactacaccatcgtggaacagtacgagcgctccgagggccgccaccacctgttcctggggcatggcaccggcagcaccggcagcggcagctccggcaccgcctcctccgaggacaacaacatggccgtcatcaaagagttcatgcgcttcaaggtgcgcatggagggctccatgaacggccacgagttcgagatcgagggcgagggcgagggccgcccctacgagggcacccagaccgccaagctgaaggtgaccaagggcggccccctgcccttcgcctgggacatcctgtccccccagttcatgtacggctccaaggcgtacgtgaagcaccccgccgacatccccgattacaagaagctgtccttccccgagggcttcaagtgggagcgcgtgatgaacttcgaggacggcggtctggtgaccgtgacccaggactcctccctgcaggacggcacgctgatctacaaggtgaagatgcgcggcaccaacttcccccccgacggccccgtaatgcagaagaagaccatgggctgggaggcctccaccgagcgcctgtacccccgcgacggcgtgctgaagggcgagatccaccaggccctgaagctgaaggacggcggccactacctggtggagttcaagaccatctacatggccaagaagcccgtgcaactgcccggctactactacgtggacaccaagctggacatcacctcccacaacgaggactacaccatcgtggaacagtacgagcgctccgagggccgccaccacctgttcctgtacggcatggacgagctgtacaagtgagtctgagatttcgttgtttttaatactttaaaaaaaaaagtctcttttagaaagaaaatgatatatagggtaagcggaatttgggagccacggccccagtaagtaattttccaagttgataggctcgtgaaagctgaacattaccgataaggcacaggttccttttgaacatgtttttctcacttaggtctcacaaaagtatgatttttctcaaaagtcctgtatttatgtattttttggattcagtgtgaggcattgaattaaagataccgattaaagattctaccctacaaatcatgtgtatttgtatattttaggttaaaaagactttatatgtttcattcactttcccatgaaactgctgacagacagaagtcactaaaataaggaattttaatgttactttttgagtaacgactgagttaccagcattcttgattcttagcgctttcgtggtgcgtgtttatgagatattagaacagcggaggctctaaaagcccaggattctactcagttatgaatgaaaatcaaacgaagatccaagctgtactgatgtcagagggatggttccattttgacagtgactttggttttttcctccgtatagattcatcgtgtagttcttcccaataacaattacccatatcattgatgtaaaacccttggacttagggggcatgaggatttaatatgcctgcggggtaacgatgttaccacagcaatggcagcttcaacttacttgttctaagcacaggg

SEQ ID NO: 240 - DNA, 4531 bp, synthetic construct
  source 1..4531: mol_type = other DNA
ggggaggtcagaggacaatacatggttttattcctatacttttaggtggattctggaggtcaaactcaggttgccagccttgagggcaagctccttttactaagcttttttttgtttttcgagacagggtttctctgtgtagccctgactgtcctggaactcactttgtggaccaggctggcctccaactcagaaatccacctgcctctacctcccaagtgctgggattaaaggtgtgtgccaccacgccctgctttcactaaactatcttgttagtccatgactagctttgtaaacaattttttgttttctcagtgtaactctgcctgtcctggaactggctcttgtgctgggatttaaggcatatgctgccactattgagcttaatttttatcgattttaatgagacaggttcagtgtctgttgccctggctgtcctgaaactcactatgcagaccaggctggcctggaactcggatcctcctgtctcctgggattaaaggcgtatgctgatcccgatctccgctatgactggctttctcctgtgggtgctgaggatttgaaccctgctgtcccttccctcactggcctgcatagataacttcgtataaagtatcctatacgaagttatgatgccctcctttggtgtgtctgaagacaggtacagagtacttacatataataaaatcttaaaaaaaaaaaaaaaaaagaaaagaaaatagttcaagtcggactggaatggacaatgatccagttgggaccaaagcccaggcagcactttggcctgagttgtgtagcagcgacaaaaatccagcaaaaatggtatgggtactattttgcatgtgagcctcaagttttccaggaaatgctagtactggctggaaggggcaagaaatggccactgagtccctcagtacacctgtatactcactttacttacccacccacccagatagacttacaatggctgatttctgagatgtggtcgtctctatagccctgggtattctcggagttgctttataaacaaggctggccttagtcacctgcttcagcctaccagaatgctgagattacaaatataaaggacatgcatttggtaaacactagactttgttgacattttctaaggtcagcaattcacactgaaattctactgcagcagcacaaagtcccagctgacacccaccagaatgtttccttcaggagtatcactgtttcacacatcagagcatctgataactgaagacttcactctgaaaccgggtattgaacctcccatttccttcttataaggaggcttgtcaactgaagggtgggggccttatctgggtcagtggactaagacctggtgagacagcctcaagctcaggatatctgacagtgtcagcagctaagaaccctgaagtcatttaccctcactcctgtttccacaggaatcaactgaatgtcctgcacaagccgctctcactcctgttggtacccagatggccctgaacagcttctatccccaacaaccctcactccagatgaacaagttctaatagctttgatagcacaactaaagacagcgcagagccacagctcaatgagcacaaaacattttggaggcctaatggaagtcagtggactctttattgcttcgggcgtgtggggctcattacgcatagtcaggaacatcgtatgggtatccgcttccaccgagcaaagagtggcgtgcaatggctatttcacactgctcaacagatgtgtaatccctgttgtgactggttacatccagtttgcggtcaatctcgtggcgccctggcatcctcacaggcttctttgccttgtaagtagatttaaattcacacaaatagtgaccacctccttccaacttcagagccatataatcgtttcctatcagcattccatctcgtgcaaagagacgctcagtgctgggttcccagccctgtgtcttcttctgcataacaggtccattgggaggaaagttctcaccagagattttgacattgtagatgaaacagttgccttggatgctggaatcattgctgacagtacacactgcaccatcttcaaagttcatgctcctctcccatgtatatccctcagggaatgactgcttgaaataatcagggatgtcttcagggtacttggtgaatggtatgcttccgtactgaagctgtggtgataaaatatcccaagcaaatggcagaggtccacccttggtgacagtgagctttactgtctgctctccctcgtaaggctttccttttccatcgccttcgacctcaaagtagtgtccattgaccgtgcctgacatataaaccttgtaggtcatttgtttagcgatcacactcaccattcctccactaccgccggagctcttggtggggcgggtccgtttcctcttcaccaccacaggcttctggcttcgaaggatggcactggccctgcggatggccgcctgaggacaggacaaggaacttagctcacaaactcaaaagacactcccatttactgctgcttgtttcctaggactccggggaggcagggtgtgtgtgtgtgtgtgtgtgtgtgtgagtgatcaaaagtcccgagtctagctccagctaggcagagccaagcacccaggcctgcatgcagcccctcaggtttagtaccagctgcccccctgccttaagtacccatccattactcaccatacgcagatcagggcggtacttgttctttcggatcatgtgtctgatgctgctgagggtagcccgagcattcttgttgatggtggtcctcacataagaagtggcaggttttcgctgacctggtaaggaaagcctaggaatcagtccatctgcatgagcccttcagagcatctgcctgatggaacacagagcctctctgaagaccatgctcaccccatcttccctccagcccattcagtacatcccttaggtgactgtcacaggtaagtcttaaagcccgggaaaatcccatccctctttaggaacctcccagatacaggagggacatagcgcatgcacttaatccaagcactcaggaagcagaggcaggtggatctctgagttctagaccaacctgatgtagagttccaggacattgaggtctacatagagaaactgtacttaagtttctctctacacttcttaatttaaagatcaccttacacagccgggaagtcagaggaagggcagttctggaccctggaaaaagggagcgctatcgtgtgcaaaggctcaccggatctgcgtttcataactaccacgacccctttgccatcggcggccggctccactccgacggtcttgcggtgaattagcccgttgtagcggaaggagtttcgggctttcagattatttggctcctggggaataggtgtacacgatgttaagttaaggcccggaggctccgatacgcaaaagagccacagtgcccctcacacgcgggcccgactcaccgtgctgtacgtctgcttattcctcttgatcaagaaactggagcagttccggacgaccatccactgcagatgcgcggacatggcggcggctggggagaagccggggggggggggggtgtgaaagatgtcagaaagaagcaggccgtggacaggcggctgggtaagcggcagcaccgttgggaaaaagcgagcaagagctttacacggccgaggaaagggtgagcaaaggaggcaggccgagctaacaccgcggagacttagaagggggaagggacgctgaggccccacttccggtggggaatgagggcagcgaatggtgcttgggtacaaggagagaaagcccaggcaggagaccgaggccgtgggagcgagataacttcgtatagcatacattatacgaagttatgcataacttcgtataggatactttatacgaagttatgtagtataacaggctgcctctgttgggaatacagtttgcaccatcacataaaaatcagtctttttccaggacagccagggctatacagagaaaccctgtctcgaaaaaccggaaagaaaaaatgagtcttttccaccaggtttaatgtcctgtaggttacttggcgtgcctccctgtgtttccttgcatggctgagcaggctcagctgtaagtctttgggaatggaggtaggtttttgtgcaactagaattggtcaggaggcccacttgcatttccttgttgatctgtttactaattagttcaaccacagcctgcacacttagaatgctcatgagcacttggagggatggcttagtaaagaccacttgctcctgcaaaggacccagtttctttcccaagaacccatgtcaggcttctgtaactccagagaatcattgccattgggctccacaggcacttctgttcacatgcacattctcacagatacacaaatatgtatgtacgtttgtgtgtgtttcatatatatgaaacatgagggaaccaaccttgtaacttctgcactgcatccaaagaggtgctcggtaaatgcttgtcacggaacgagcaagagacag

SEQ ID NO: 241 - DNA, 3624 bp, synthetic construct
  source 1..3624: mol_type = other DNA
gcaggcagctgtcccttcgctcccagcattccattctccaccgttggccctccgtggagcttcacactgtgcaaccagtagcacccagtgctctagggagctgagtctcctaagagtcagagacaaagattaggaggaatagccgttcttagccccagggagactgaaaagtgtaggggtgtagggtgacttttgagggcctttgaggctttgactagtcctaagtcctttatatgtatacatatatgtgtgtgtctgtataggtgggtgtgtgtacacgtgtgagtgtgcatgtctgtggaggatagagattaaaatttgatgtctgcctcaattaccttttacctttttgttttgttttgttttgttttgtttttttgagacagggtctcccatggaacggagaactcgccatcttggttagccagattggcaagtgatttctagggtttctacgaccccattgttgagactacaagtacctacctacctatctaccactgtacccattttgtgatgtgggttctgggggattaaaccttgacccttgggtaggagagatggctcagtggttaagagcactgactgctcttccagaggtcctgagttcaattcccagcaaccacatggtggctcacaaccatctgtaatgggatctgatgccctcttctggtgtgtctgaagagagtgatagtgtgctcatatacataaaataaataaatcttaaaaaacaaaaaccaaaaaaccaaaaaaccccccaaaacccttgaccccagtgtgtttgtggcagtactccactggccaccatgggccccaagaagaagaggaaggtgacctctgatgaagtcaggaagaacctgatggacatgttcagggacaggcaggccttctctgaacacacctggaagatgctcctgtctgtgtgcagatcctgggctgcctggtgcaagctgaacaacaggaaatggttccctgctgaacctgaggatgtgagggactacctcctgtacctgcaagccagaggcctggctgtgaagaccatccaacagcacctgggccagctcaacatgctgcacaggagatctggcctgcctcgcccttctgactccaatgctgtgtccctggtgatgaggagaatcagaaaggagaatgtggatgctggggagagagccaagcaggccctggcctttgaacgcactgactttgaccaagtcagatccctgatggagaactctgacagatgccaggacatcaggaacctggccttcctgggcattgcctacaacaccctgctgcgcattgccgaaattgccagaatcagagtgaaggacatctcccgcaccgatggtgggagaatgctgatccacattggcaggaccaagaccctggtgtccacagctggtgtggagaaggccctgtccctgggggttaccaagctggtggagagatggatctctgtgtctggtgtggctgatgaccccaacaactacctgttctgccgggtcagaaagaatggtgtggctgccccttctgccacctcccaactgtccacccgggccctggaagggatctttgaggccacccaccgcctgatctatggtgccaaggatgactctgggcagagatacctggcctggtctggacactctgccagagtgggtgctgccagggacatggcgagggctggtgtgtccatccctgaaatcatgcaggctggtggctggaccaatgtgaacattgtgatgaactacatcagaaacctggactctgagactggggccatggtgaggctgctcgaggatggggacggaagcggagctactaacttcagcctgctgaagcaggctggagacgtggaggagaaccctggacctatgagctttccatgtaaatttgtagccagcttccttctgattttcaatgtttcttccaaaggtgcagtctccaaagagattacgaatgccttggaaacctggggtgccttgggtcaggacatcaacttggacattcctagttttcaaatgagtgatgatattgacgatataaaatgggaaaaaacttcagacaagaaaaagattgcacaattcagaaaagagaaagagactttcaaggaaaaagatacatataagctatttaaaaatggaactctgaaaattaagcatctgaagaccgatgatcaggatatctacaaggtatcaatatatgatacaaaaggaaaaaatgtgttggaaaaaatatttgatttgaagattcaagagagggtctcaaaaccaaaaatctcctggacttgtatcaacacaaccctgacctgtgaggtaatgaatggaactgaccccgaattaaacctgtatcaagatgggaaacatctaaaactttctcagagggtcatcacacacaagtggaccaccagcctgagtgcaaaattcaagtgcacagcagggaacaaagtcagcaaggaatccagtgtcgagcctgtcagctgtccagagaaaggtctggacatctatctcatcattggcatatgtggaggaggcagcctcttgatggtctttgtggcactgctcgttttctatatcaccaaaaggaaaaaacagaggtagctgtgccttctagttgccagccatctgttgtttgcccctcccccgtgccttccttgaccctggaaggtgccactcccactgtcctttcctaataaaatgaggaaattgcatcgcattgtctgagtaggtgtcattctattctggggggtggggtggggcaggacagcaagggggaggattgggaagacaatagcaggcatgctggggatgcggtgggctctatggactaggtcatctctgacttcacggtctttggtggtaaacaggcccatgtatactgttcttctcaaaacacaatgccaatctggagagctttgaaaagaggcaaagtgatggcacccctacctaggaacagagtcagaaagaggcttctggaaaggttagggcactcaaaggatggggaccttaatggcctgcctctatcccagagctatcccctcctgctcttctgtgctcctatctgcccatcactgctcagttttctgtgcctcaccagctcgctttcatctcccttagttattgttcttctttcttcttttcacttatctttttttaatagtatgggtgttttgcctgcatgtttatttgtgcaccatttgtgtgtttggttcactatgcaggaaagaaaaagatatcaggtgccctggaactggagtcatacatgactgtgagccactgtgtggatgctgggaattgaacctgggttcttctggaagagcagcctgtgctcttaactgctgaaccccgcccctcctctcattttcctagggtgacctccaactcacaacattgccttgggtgtgctggggttacagacctgcatcgctgaccaggtccttttctcttggtgattatgggtcttaagaccttccagatgacccctccctcaagctagaggcacagggtggaggcccctagggatgctttcagatgccacacagtatggcagtggcagacactgcctggcactgtcagaatgactgtgagggctcaggaagcgaccgggtcctggcttgagagtggc

SEQ ID NO: 242 - DNA, 3964 bp, synthetic construct
  source 1..3964: mol_type = other DNA
ccagatacttccaagttgcattgctcactagggattgttatgaaagaacttgagggccgatgtacacacagagcacagcacagcacagcacagatagagcttggggagtgggcggacttctcagagttcacaggtttaagtgcgaagtgccaggttgtgaagtgactgaagagctattatcccgggaagaagaaacccttcaggcttttaatacagattttagaagttacattatatgtgtgtattggtctccttccaccaagtggatctctaggattaaactcaagactgtcagacttcgtgacaagtaccttgagtcatgtcacctagttttcttctttattatctgtctaagggcgaaggtcatgttgaataacaactgtacactcaccttagaggcagttgccaggaggaactaatgtttgaagctgtccatcctacccattgatcaggttgctgtcagcacggaggattgtttggtcaatgctgccatctggtggacaactggagcaaggtttctttggcctggggattggtggtgggaacctagtggaggtagaaggagcttgagaagggtgacttgtgtgtgtgtgtgtgtgtgtgtgtgtgtgtgtgtgtgtgtgtgtgtgtatgtgtagctgcccctgctgagatttttgttaagaagaagcaggtcctatacggggacaattggcaccatgggaagtgagaaaggctaagaggaaggaggaagtggtctagggcctgctgtgtacctgcctttctctatccctcttccaagtctggcaggaggaacaagttacgttactggccgaagccgcttggaataaggccggtgtgcgtttgtctatatgttattttccaccatattgccgtcttttggcaatgtgagggcccggaaacctggccctgtcttcttgacgagcattcctaggggtctttcccctctcgccaaaggaatgcaaggtctgttgaatgtcgtgaaggaagcagttcctctggaagcttcttgaagacaaacaacgtctgtagcgaccctttgcaggcagcggaaccccccacctggcgacaggtgcctctgcggccaaaagccacgtgtataagatacacctgcaaaggcggcacaaccccagtgccacgttgtgagttggatagttgtggaaagagtcaaatggctctcctcaagcgtattcaacaaggggctgaaggatgcccagaaggtaccccattgtatgggatctgatctggggcctcggtgcacatgctttacatgtgtttagtcgaggttaaaaaaacgtctaggccccccgaaccacggggacgtggttttcctttgaaaaacacgatgataatatatgcgcacaaccatgcccaagaagaagaggaaggtgacctctgatgaagtcaggaagaacctgatggacatgttcagggacaggcaggccttctctgaacacacctggaagatgctcctgtctgtgtgcagatcctgggctgcctggtgcaagctgaacaacaggaaatggttccctgctgaacctgaggatgtgagggactacctcctgtacctgcaagccagaggcctggctgtgaagaccatccaacagcacctgggccagctcaacatgctgcacaggagatctggcctgcctcgcccttctgactccaatgctgtgtccctggtgatgaggagaatcagaaaggagaatgtggatgctggggagagagccaagcaggccctggcctttgaacgcactgactttgaccaagtcagatccctgatggagaactctgacagatgccaggacatcaggaacctggccttcctgggcattgcctacaacaccctgctgcgcattgccgaaattgccagaatcagagtgaaggacatctcccgcaccgatggtgggagaatgctgatccacattggcaggaccaagaccctggtgtccacagctggtgtggagaaggccctgtccctgggggttaccaagctggtggagagatggatctctgtgtctggtgtggctgatgaccccaacaactacctgttctgccgggtcagaaagaatggtgtggctgccccttctgccacctcccaactgtccacccgggccctggaagggatctttgaggccacccaccgcctgatctatggtgccaaggatgactctgggcagagatacctggcctggtctggacactctgccagagtgggtgctgccagggacatggcgagggctggtgtgtccatccctgaaatcatgcaggctggtggctggaccaatgtgaacattgtgatgaactacatcagaaacctggactctgagactggggccatggtgaggctgctcgaggatggggacggaagcggagctactaacttcagcctgctgaagcaggctggagacgtggaggagaaccctggacctatgagctttccatgtaaatttgtagccagcttccttctgattttcaatgtttcttccaaaggtgcagtctccaaagagattacgaatgccttggaaacctggggtgccttgggtcaggacatcaacttggacattcctagttttcaaatgagtgatgatattgacgatataaaatgggaaaaaacttcagacaagaaaaagattgcacaattcagaaaagagaaagagactttcaaggaaaaagatacatataagctatttaaaaatggaactctgaaaattaagcatctgaagaccgatgatcaggatatctacaaggtatcaatatatgatacaaaaggaaaaaatgtgttggaaaaaatatttgatttgaagattcaagagagggtctcaaaaccaaaaatctcctggacttgtatcaacacaaccctgacctgtgaggtaatgaatggaactgaccccgaattaaacctgtatcaagatgggaaacatctaaaactttctcagagggtcatcacacacaagtggaccaccagcctgagtgcaaaattcaagtgcacagcagggaacaaagtcagcaaggaatccagtgtcgagcctgtcagctgtccagagaaaggtctggacatctatctcatcattggcatatgtggaggaggcagcctcttgatggtctttgtggcactgctcgttttctatatcaccaaaaggaaaaaacagaggtagcccaggaaggaagaggcagagagaaggtcactgctgacgtcaagggctttcaggtaggaggtaaacacaagatgacccacttttattccactgtctttcaccttcatcttctggctggagtagccttttctggcatccctgataacagcactcactccttgatagtatcctctgtcccagatcccagtccctataatcccaagtacttatgggtacccaagcactattctgtgcttctcccctggccccccagcccctgtagggtgtctgtatgtcttggaacttgctctgtagacttgaactcagaaatcttcttgtctctgccgctgagtgctgggattaaatgtgtttgctagcatacctggtttactctttggttcttgactccagccattcttcctgctcctgcacaggtgcacaggtgtatggactagccagagggaggcaggaagggttaaagggcactgtgtgtttagtctgtgctcgcctggctcactcttaaggttcaaaaatttcatttgtctttaggacaaatattgatctaaggggtaggaaaggccagtttcttctcttcagacacagggacctttaggagagggtggctttctgctcttgctggggtgacaccaggactcaagggctctctgaaagcgcagggttttgttagactcgagggacctgtgatggttagttttaattgtcaacttgacacagtctagaatctcttgggaagagaaaagtctagatcatgttggcctgtgggtatgtcagtgggggattctcttgattgcaattacttgatgtgg

SEQ ID NO: 243 - DNA, 3960 bp, synthetic construct
  source 1..3960: mol_type = other DNA
gggggaggagacatccacctggaaaccattaatggttaatagctcagtttataaatggagaaaaaggagagaggcattcatgggagtggaaagttaagctttaggttggattctcaatacatctattgttgtaaaactccctggactgagaataggcccaaatgtggaacaccacctgacgggagaggtgatagacactgaaaattaaggatcaaggcaaaggatcaacaaaaagtgtactaaggagttataaaagaactgcagtgttgaggccccagctacagcctcgatttgtggtgtatgtaactaatctgtctggtttcatgagtcatcagacttctaagatcaggaaagggaaaatgccaatgctctgtctaggggttggataagccagtataataaatgaaaatggggctaaaatgagtgttctaaaataccttttgataaggctgcagaaggagcgggagaaatggatatgaagtactgggctctttaaaaatgattaaaattctgcttacatagtctaactcgcgacactgtgaattatagagcccaccgcatccccagcatgcctgctattgtcttcccaatcctcccccttgctgtcctgccccaccccaccccccagaatagaatgacacctactcagacaatgcgatgcaatttcctcattttattaggaaaggacagtgggagtggcaccttccagggtcaaggaaggcacgggggaggggcaaacaacagatggctggcaactagaaggcacagtcgaggctgatcagcggtttaaacttaagctacggtatcgatgcggggaggcggcccaaagggagatccgactcgtctgagggcgaaggcgaagacgcggaagaggccgcagagccggcagcaggccgcgggaaggaaggtccgctggattgagggccgaagggacgtagcagaaggacgtcccgcgcagaatccaggtggcaacacaggcgagcagccaaggaaaggacgatgatttccccgacaacaccacggaattgtcagtgcccaacagccgagcccctgtccagcagcgggcaaggcaggcggcgatgagttccgccgtggcaatagggagggggaaagcgaaagtcccggaaaggagctgacaggtggtggcaatgccccaaccagtgggggttgcgtcagcaaacacagtgcacaccacgccacgttgcctgacaacgggccacaactcctcataaagagacagcaaccaggatttatacaaggaggagaaaatgaaagccatacgggaagcaatagcatgatacaaaggcattaaagcagcgtatccacatagcgtaaaaggagcaacatagttaagaataccagtcaatctttcacaaattttgtaatccagaggttgattatcgataagcttgatatcgaattcttacacctcgttctcgtagcagaacttgtacagctcgtccatgccgccggtggagtggcggccctcggagcgttcgtactgttccaccacggtgtagtcctcgttgtgggaggtgatgtccaacttgcggtccacgttgtaggcgccgggcatctgcacgggcttcttggccttgtaggtggtcttgaagtccgccaggtagcgcccgccgtccttcaggcgcagggccatcttaatgtcgcccttcagcacgccgtcctcggggtacaaccgctcggtggacgcttcccagcccattgtcttcttctgcattacggggccgtcaggagggaagttggtgccgcggagcttcaccttgtagatcagggtgccgtcctccagggaggtgtcctgggtcacggtcacggcgccgccgtcctcgaagttcatcacgcggtcccacttgaagccctcggggaaggactgcttatagtagtcggggatgtcggcggggtgcttggtgaaggccctggagccgtacatgaactgaggggacaggatgtcccaggagaagggcagggggccacccttggtcaccttcagcttggcggtctgggtgccctcgtaggggcggccctcgccctcgccctcgatctcgaactcgtggccgttcatggagccctccatgtgcaccttgaaccgcatgaactccttgatcactgcctcgcccttgctcaccacgttgatgtcgatctggtccagggggatgtactcgccctcgctggtgatcctgctcttggcggccgcagacagtctccgcaggcgctcgccattgctgctcagcctcatatccagctccagcttctggaactcatcctcgtcgtgtcccagctgctccagcagccgaaacagctcctcatcataggtctttctgaaccgggccagggcaaagccgtaacaggacttggccacgatgtcgcacacgcagtgggccacctctgtccagttatcgtcgatccagccgaagcctctagggcagatggcccacaccaggggaaacagaatccacagcatggagaaggtaaacacggcgaacttcagcacgtgcaggctgtgctcggcgcctgtatcctgggccagctgggccagccggctatactgcttggccacgatgctcatcacgatagagtaggcgaagataaaccagaaacagccaaagccataccaggcgtaggcgccattcctcagcctagggtcgccctctgcgtagaactcggccagcacgccagacatcaggatggcaaagatgatggcgctacaagacacgcgatagggggccctcagctgatacagcagatcgtacaccagcattgggcaggtcagcatgtagtcggcatacctgtaattgccgaagccgatgatgaaggggcccacatcgccgaagttgtggcccagtgtgtcggccacgatcttgccgaagtagctcagcatggcaaagaaattcacaaacagggccaggttctgctcctcctgatagccggcgtaaaaggaggttctcttgctagggccccgagatgtccaggactcatagcccaggtagaatgtggtgattgtcagcacgataaagcaagaccacctggcgccgatggccacggagttcagcttggtatccagataccagccgtccattgtgcccacgtagaacatctggtcggtgcctggtgcgtgtgccatggtggcggatccactcgagtctagaaattcgatctagcttgggctgcaggtcgagggacctaataacttcgtatagcatacattatacgaagttatattaagggttccggatcagcttgatggggatccagacatgataagatacattgatgagtttggacaaaccacaactagaatgcagtgaaaaaaatgctttatttgtgaaatttgtgatgctattgctttatttgtaaccattataagctgcaataaacaagttaacaacaacaattgcattcattttatgtttcaggttcagggggaggtgtgggaggttttttaaagcaagtaaaacctctacaaatgtggtatggctgattatgatcctctagagtcgcagatccagacatgataagatacattgatgagtttggacaaaccacaactagaatgcagtgaaaaaaatgctttatttgtgaaatttgtgatgctattgctttatttgtaaccattataagctgcaataaacaagttaacaacaacaattgcattcattttatgtttcaggttcagggggaggtgtgggaggttttttaaagcaagtaaaacctctacaaatgtggtatggctgattatgatcctctagagtcgcagatccagacatgataagatacattgatgagtttggacaaaccacaactagaatgcagtgaaaaaaatgctttatttgtgaaatttgtgatgctattgctttatttgtaaccattataagctgcaataaacaagttaacaacaacaattgcattcattttatgtttcaggttcagggggaggtgtgggaggtt

SEQ ID NO: 244 - DNA, 3520 bp, synthetic construct
  source 1..3520: mol_type = other DNA
ggtgaatcttggtggaatcttactttagtttgtggctgagatcttatgaggggggagtagatgttctttacatttccccagggaggtgattcttgaaacacaccagagattggctgtttccctatcccctgctgattggggtaatagacacagttaacccttgctgaggacctctgcgtatctggaccctggattgtaggaaaccacctttagccccgggataaacttgcttatcaccaatagccccaccttacagatacatggtttgaagcacagaaaagttacaggcctgagcgcacacacagcaaatgggaactctggcactggtctgcatccatacctgctgccttacacaatagggttgtgttctggtgacatgccagcctcctaagaagccactgtcctccaatctgggggaaactgggaccagtggagatggcagacaccctggctacagcgtcagggtaatgacaccccccctcaaatgaggctctgcaaggagatagaataacctaaaagactgtctggcgccagctatgcagggccacccatgccagccttgcgggaaagcagctgacctttactgtagaagcctcctttccttcctccctccctcacgcccttctccctccttgaatcacagcgcctaccctagtcctgactgttgctcaatccaggagcacagttcctgtgggctgagcctgactggcttggtcatctcttttctgcacttcaagggaaaagcaagatcttgcacaaggtcccctccggctggctgctggcaaaggaaaggtgccatgcccaagaagaagaggaaggtggccggcagcgccagcaacctgctgactgtgcaccaaaacctgcctgccctccctgtggatgccacctctgatgaagtcaggaagaacctgatggacatgttcagggacaggcaggccttctctgaacacacctggaagatgctcctgtctgtgtgcagatcctgggctgcctggtgcaagctgaacaacaggaaatggttccctgctgaacctgaggatgtgagggactacctcctgtacctgcaagccagaggcctggctgtgaagaccatccaacagcacctgggccagctcaacatgctgcacaggagatctggcctgcctcgcccttctgactccaatgctgtgtccctggtgatgaggagaatcagaaaggagaatgtggatgctggggagagagccaagcaggccctggcctttgaacgcactgactttgaccaagtcagatccctgatggagaactctgacagatgccaggacatcaggaacctggccttcctgggcattgcctacaacaccctgctgcgcattgccgaaattgccagaatcagagtgaaggacatctcccgcaccgatggtgggagaatgctgatccacattggcaggaccaagaccctggtgtccacagctggtgtggagaaggccctgtccctgggggttaccaagctggtggagagatggatctctgtgtctggtgtggctgatgaccccaacaactacctgttctgccgggtcagaaagaatggtgtggctgccccttctgccacctcccaactgtccacccgggccctggaagggatctttgaggccacccaccgcctgatctatggtgccaaggatgactctgggcagagatacctggcctggtctggccactctgccagagtgggtgctgccagggacatggccagggctggtgtgtccatccctgaaatcatgcaggctggtggctggaccaatgtgaacattgtgatgaactacatcagaaacctggactctgagactggggccatggtgaggctgctcgaggatggggacggtggctctggaggtgctactaacttcagcctgctgaagcaggctggagacgtggaggagaaccctggacctatgagcaaaggagaagaacttttcactggagttgtcccaattcttgttgaattagatggtgatgttaatgggcacaaattttctgtccgtggagagggtgaaggtgatgctacaaacggaaaactcacccttaaatttatttgcactactggaaaactacctgttccgtggccaacacttgtcactactctgacctatggtgttcaatgcttttcccgttatccggatcacatgaaacggcatgactttttcaagagtgccatgcccgaaggttatgtacaggaacgcactatatctttcaaagatgacgggacctacaagacgcgtgctgaagtcaagtttgaaggtgatacccttgttaatcgtatcgagttaaagggtattgattttaaagaagatggaaacattcttggacacaaactcgagtacaactttaactcacacaatgtatacatcacggcagacaaacaaaagaatggaatcaaagctaacttcaaaattcgccacaacgttgaagatggttccgttcaactagcagaccattatcaacaaaatactccaattggcgatggccctgtccttttaccagacaaccattacctgtcgacacaatctgtcctttcgaaagatcccaacgaaaagcgtgaccacatggtccttcttgagtttgtaactgctgctgggattacacatggcatggatgagctctacaaaggaggatctggcggaagatctgaaggccgcggcagcctgctgacatgcggcgacgtggaagagaaccctggccctatgggacctctccaccagtttctcctgctgctgatcacaggtgggaccacaggagggacctaccttcagcaacactgtcttttcctcaccttccttgagcagatggctggggtgtgggggcagggtggcatggagggggaactattatggaggctggagtcctggtacactccagtgtcctgctttgactctgcttttctcccccactggctcattcgtgttcttcacacatcctccccgagattaatatccacctataggaagggtaacaggggcagctggaattagtcactgaaggagctgtgagggtggcactagttgtgaggtaggggactcgttaagacactgccaagagcccttaaacactcaagaagcacttaaaccataagtggaggggcagaatgggagagaagagagaaagacagactaggatttgcatcttcctggaggtcctcccagattcgacctcagcgctctgtgggaggtgaggatgctgtaggctttatcagtgtatcctcacctgtaatggactgactcattccagtgtgggctgggtgcctcctgttcctgcaaagtcatggacaaacccaggtaggagaagaggctgccctgcatcttgtccctgcagcatctcagctggaagtggaaggagaggtagggaacgttagcctgtctctaggcagactgaggtctctgaaaggcaggccatcagctccgtaattccccctttcatgttcccatctcagtaatagctggagacaaggtgcaagaggtagaaagtttggctgaacccttgtccc

SEQ ID NO: 245 - DNA, 4447 bp, synthetic construct
  source 1..4447: mol_type = other DNA
ggtgaatcttggtggaatcttactttagtttgtggctgagatcttatgaggggggagtagatgttctttacatttccccagggaggtgattcttgaaacacaccagagattggctgtttccctatcccctgctgattggggtaatagacacagttaacccttgctgaggacctctgcgtatctggaccctggattgtaggaaaccacctttagccccgggataaacttgcttatcaccaatagccccaccttacagatacatggtttgaagcacagaaaagttacaggcctgagcgcacacacagcaaatgggaactctggcactggtctgcatccatacctgctgccttacacaatagggttgtgttctggtgacatgccagcctcctaagaagccactgtcctccaatctgggggaaactgggaccagtggagatggcagacaccctggctacagcgtcagggtaatgacaccccccctcaaatgaggctctgcaaggagatagaataacctaaaagactgtctggcgccagctatgcagggccacccatgccagccttgcgggaaagcagctgacctttactgtagaagcctcctttccttcctccctccctcacgcccttctccctccttgaatcacagcgcctaccctagtcctgactgttgctcaatccaggagcacagttcctgtgggctgagcctgactggcttggtcatctcttttctgcacttcaagggaaaagcaagatcttgcacaaggtcccctccggctggctgctggcaaaggaaaggtgccatggccggcagcgccagcaacctgctgactgtgcaccaaaacctgcctgccctccctgtggatgccacctctgatgaagtcaggaagaacctgatggacatgttcagggacaggcaggccttctctgaacacacctggaagatgctcctgtctgtgtgcagatcctgggctgcctggtgcaagctgaacaacaggaaatggttccctgctgaacctgaggatgtgagggactacctcctgtacctgcaagccagaggcctggctgtgaagaccatccaacagcacctgggccagctcaacatgctgcacaggagatctggcctgcctcgcccttctgactccaatgctgtgtccctggtgatgaggagaatcagaaaggagaatgtggatgctggggagagagccaagcaggccctggcctttgaacgcactgactttgaccaagtcagatccctgatggagaactctgacagatgccaggacatcaggaacctggccttcctgggcattgcctacaacaccctgctgcgcattgccgaaattgccagaatcagagtgaaggacatctcccgcaccgatggtgggagaatgctgatccacattggcaggaccaagaccctggtgtccacagctggtgtggagaaggccctgtccctgggggttaccaagctggtggagagatggatctctgtgtctggtgtggctgatgaccccaacaactacctgttctgccgggtcagaaagaatggtgtggctgccccttctgccacctcccaactgtccacccgggccctggaagggatctttgaggccacccaccgcctgatctatggtgccaaggatgactctgggcagagatacctggcctggtctggccactctgccagagtgggtgctgccagggacatggccagggctggtgtgtccatccctgaaatcatgcaggctggtggctggaccaatgtgaacattgtgatgaactacatcagaaacctggactctgagactggggccatggtgaggctgctcgaggatggggacctcgagccatctgctggagacatgagagctgccaacctttggccaagcccgctcatgatcaaacgctctaagaagaacagcctggccttgtccctgacggccgaccagatggtcagtgccttgttggatgctgagccccccatactctattccgagtatgatcctaccagacccttcagtgaagcttcgatgatgggcttactgaccaacctggcagacagggagctggttcacatgatcaactgggcgaagagggtgccaggctttgtggatttgaccctccatgatcaggtccaccttctagaatgtgcctggctagagatcctgatgattggtctcgtctggcgctccatggagcacccagtgaagctactgtttgctcctaacttgctcttggacaggaaccagggaaaatgtgtagagggcatggtggagatcttcgacatgctgctggctacatcatctcggttccgcatgatgaatctgcagggagaggagtttgtgtgcctcaaatctattattttgcttaattctggagtgtacacatttctgtccagcaccctgaagtctctggaagagaaggaccatatccaccgagtcctggacaagatcacagacactttgatccacctgatggccaaggcaggcctgaccctgcagcagcagcaccagcggctggcccagctcctcctcatcctctcccacatcaggcacatgagtaacaaaggcatggagcatctgtacagcatgaagtgcaagaacgtggtgcccctctatgacctgctgctggaggcggcggacgcccaccgcctacatgcgcccactagccgtggaggggcatccgtggaggagacggaccaaagccacttggccactgcgggctctacttcatcgcattccttgcaaaagtattacatcacgggggaggcagagggtttccctgccacaggtggctctggaggtgctactaacttcagcctgctgaagcaggctggagacgtggaggagaaccctggacctatgagcaaaggagaagaacttttcactggagttgtcccaattcttgttgaattagatggtgatgttaatgggcacaaattttctgtccgtggagagggtgaaggtgatgctacaaacggaaaactcacccttaaatttatttgcactactggaaaactacctgttccgtggccaacacttgtcactactctgacctatggtgttcaatgcttttcccgttatccggatcacatgaaacggcatgactttttcaagagtgccatgcccgaaggttatgtacaggaacgcactatatctttcaaagatgacgggacctacaagacgcgtgctgaagtcaagtttgaaggtgatacccttgttaatcgtatcgagttaaagggtattgattttaaagaagatggaaacattcttggacacaaactcgagtacaactttaactcacacaatgtatacatcacggcagacaaacaaaagaatggaatcaaagctaacttcaaaattcgccacaacgttgaagatggttccgttcaactagcagaccattatcaacaaaatactccaattggcgatggccctgtccttttaccagacaaccattacctgtcgacacaatctgtcctttcgaaagatcccaacgaaaagcgtgaccacatggtccttcttgagtttgtaactgctgctgggattacacatggcatggatgagctctacaaaggaggatctggcggaagatctgaaggccgcggcagcctgctgacatgcggcgacgtggaagagaaccctggccctatgggacctctccaccagtttctcctgctgctgatcacaggtgggaccacaggagggacctaccttcagcaacactgtcttttcctcaccttccttgagcagatggctggggtgtgggggcagggtggcatggagggggaactattatggaggctggagtcctggtacactccagtgtcctgctttgactctgcttttctcccccactggctcattcgtgttcttcacacatcctccccgagattaatatccacctataggaagggtaacaggggcagctggaattagtcactgaaggagctgtgagggtggcactagttgtgaggtaggggactcgttaagacactgccaagagcccttaaacactcaagaagcacttaaaccataagtggaggggcagaatgggagagaagagagaaagacagactaggatttgcatcttcctggaggtcctcccagattcgacctcagcgctctgtgggaggtgaggatgctgtaggctttatcagtgtatcctcacctgtaatggactgactcattccagtgtgggctgggtgcctcctgttcctgcaaagtcatggacaaacccaggtaggagaagaggctgccctgcatcttgtccctgcagcatctcagctggaagtggaaggagaggtagggaacgttagcctgtctctaggcagactgaggtctctgaaaggcaggccatcagctccgtaattccccctttcatgttcccatctcagtaatagctggagacaaggtgcaagaggtagaaagtttggctgaacccttgtccc

SEQ ID NO: 246 - DNA, 3853 bp, synthetic construct
  source 1..3853: mol_type = other DNA
tagaaaacccctatgtccttctgtagctgcctaccttaacatacagccgtatatttagtcaagaccttagtttatggcactcttttgttctgtgactgtaaaagttcatgtaaacgcttgatgtattggcatattccaggagaattaagagctcaaggccagcctcagcaacacagtgaatttgaggtcaatctgggttatgtgagactttgtctcaaaaagtaaaatattatgtatctttttacccagtacatcaggtctttcaggataacttgactccacgaactgggtcatggtcactcatatttggcacaaagaaaattgcttgtattttttaaaatgaagttattttatgttaacatattttaggaatttgacttccatttttccattgtcctcgatccttaccatccccatgatttaactctaggggagtgaatttagtttttggcccatgagataatttaggctgaaaactatagttttaagttattcagccatcaaaaataataacttacaaagcaacttggaatcaaacacttccatttctttcagcaatgaaaacatataactgttctattcaaggaaaggtacctagattgccttctctaaaagtacaaatccttgggaaagctcagataaaaggaatctgagactcagaggcaagcctcggaactcttaaggtttattggcctgctaagtggttccagtgaccatcaaagtttcagaaccctgatgctggctattaaaagaagaaaaaaagtataagtttaaaatgtatgcagaggaactcacctgactctgagtcccatagagcccaccgcatccccagcatgcctgctattgtcttcccaatcctcccccttgctgtcctgccccaccccaccccccagaatagaatgacacctactcagacaatgcgatgcaatttcctcattttattaggaaaggacagtgggagtggcaccttccagggtcaaggaaggcacgggggaggggcaaacaacagatggctggcaactagaaggcacagtcgaggctgatcagcgggtttaaacgggccctctagactcgagcggccgtgtggcagggaaaccctctgcctcccccgtgatgtaatacttttgcaaggaatgcgatgaagtagagcccgcagtggccaagtggctttggtccgtctcctccacggatgcccctccacggctagtgggcgcatgtaggcggtgggcgtccgccgcctccagcagcaggtcatagaggggcaccacgttcttgcacttcatgctgtacagatgctccatgcctttgttactcatgtgcctgatgtgggagaggatgaggaggagctgggccagccgctggtgctgctgctgcagggtcaggcctgccttggccatcaggtggatcaaagtgtctgtgatcttgtccaggactcggtggatatggtccttctcttccagagacttcagggtgctggacagaaatgtgtacactccagaattaagcaaaataatagatttgaggcacacaaactcctctccctgcagattcatcatgcggaaccgagatgatgtagccagcagcatgtcgaagatctccaccatgccctctacacattttccctggttcctgtccaagagcaagttaggagcaaacagtagcttcactgggtgctccatggagcgccagacgagaccaatcatcaggatctctagccaggcacattctagaaggtggacctgatcatggagggtcaaatccacaaagcctggcaccctcttcgcccagttgatcatgtgaaccagctccctgtctgccaggttggtcagtaagcccatcatcgaagcttcactgaagggtctggtaggatcatactcggaatagagtatggggggctcagcatccaacaaggcactgaccatctggtcggccgtcagggacaaggccaggctgttcttcttagagcgtttgatcatgagcgggcttggccaaaggttggcagctctcatgtctccagcagatggctcgagatcgccatcttccagcaggcgcaccattgcccctgtttcactatccaggttacggatatagttcatgacaatatttacattggtccagccaccagcttgcatgatctccggtattgaaactccagcgcgggccatatctcgcgcggctccgacacgggcactgtgtccagaccaggccaggtatctctgaccagagtcatccttagcgccgtaaatcaatcgatgagttgcttcaaaaatcccttccagggcgcgagttgatagctggctggtggcagatggcgcggcaacaccattttttctgacccggcaaaacaggtagttattcggatcatcagctacaccagagacggaaatccatcgctcgaccagtttagttacccccaggctaagtgccttctctacacctgcggtgctaaccagcgttttcgttctgccaatatggattaacattctcccaccgtcagtacgtgagatatctttaaccctgatcctggcaatttcggctatacgtaacagggtgttataagcaatccccagaaatgccagattacgtatatcctggcagcgatcgctattttccatgagtgaacgaacctggtcgaaatcagtgcgttcgaacgctagagcctgttttgcacgttcaccggcatcaacgttttcttttcggatccgccgcataaccagtgaaacagcattgctgtcacttggtcgtggcagcccggaccgacgatgaagcatgtttagctggcccaaatgttgctggatagtttttactgccagaccgcgcgcctgaagatatagaagataatcgcgaacatcttcaggttctgcgggaaaccatttccggttattcaacttgcaccatgccgcccacgaccggcaaacggacagaagcattttccaggtatgctcagaaaacgcctggcgatccctgaacatgtccatcaggttcttgcgaacctcatcactcgttgcatcgaccggtaatgcaggcaaattttggtgtacggtcagtaaattcatgtcagggtttcaagtctgtacgctttgtgcttcctttgatctcctccagtgctagagtttcacgtaggtaacaaccctatgcttgataaaggttctattaaattgtctaggctggcctcaaacttccccttcattaagaatgaaattttggagctaaagttttttttttaatgtttccttatgtttggtttcgatatgaactgtatacatgatctctagtctaaactataaagctctaaaacactgtttagctatggattgggggtcttttggtctaaccaacttcaacaagacacgtgactctggccgggcgtggtggcgcatgcttttaatcctggcactcgggaggcagaggcagcggatttctgagttcaaggccagcctggtctacaaagtgagttccaggacagccaaggctacacagagaaaccctgtctcaaaaaaccaaaaaaccaaaaaacaaaacaaacaaacaaacaaacaaaaaaaaaaaaccaaaaaaaccccccaagaagacaaacaaacaaaaaaagaaagatatgtgactctgtgcagcaatcctgtgcaaaatgagaccagatgtggccatattgtcacatcaaaggcagtgctgctttctaggtgtggtaggtggtacattcctagtaatctcaaaatttaggagataaaggtaagaggaccagaatttaaggtaaacctatgtatacagtaagccggaggccagaccgggctacaaggagaccttgtctaaacatccagacaaataacccccaaataaaggtactgctgctgtgttg

SEQ ID NO: 247 - DNA, 3282 bp, synthetic construct
  source 1..3282: mol_type = other DNA
caggtgacaaacctctttgatcctagatctcaggaaacaggcagatcaatatgaatttcagactagcttggtctctggtgagtttcaggctatccaggccttcaatagtaagactctgtcggggggtggtagggaggaaagaagaaaagaagaaaaagatgggattgcagtacttgcttatcagtttttgttacttttcttccccaggttggatttaacctgctaaactctctgccattatggaaggctagctctcaggaatttctctttggttgtgtggatagataggctttgtgcctatagcccgtagtctcagtactggagaaactgagtgaaaaagattacttaggccctggaatttgaaaaaagcctgggcaaaatagccagatatggtcttcaaagacaaagcttagttagcatgctagacagctcatgcttataatcacaggacttgggtactcaagacaggaggactgccttgaatttgaacttcataccaagttaagggcattctgtagggggaggattgtttcccttatattattcagcatacagttagtgatgaatggtaaaataaggaaactgaggtataccgtcatacagcataggcagatttccttctacaataatggttttcatttagcggggaggatggggttagacgggatttcatgtagcccaggctggttttacacttaagatgtagccaaagatgcacttgaacttgtgaatgcttttcatttgaacttgtactggtggggcttttaatgggtaaaacttacccagttaagagattgagcataacttcgtataaagtatcctatacgaagttatgcataacttcgtatagcatacattatacgaagttataggtggagtcaggaggaataagagttctaggttggcgatagctacaagagatcatgtctcaagccaaaaataacccagagaacaaacaaacaaaacctccaaaataccaaccaaaaaacaaataaaactattctacaaaggaaacagaaatactgagtataaattggatacaaaagttcttcaaattttttccattaaatcaactcctgactttaaaaaaaattttattctttaaagttttatagatttatatcatatatgctcatgatatctccctgactccttgatcaaagatcaaccaatctaaaatactattaaatttttatcaagtaatgcacagatttttaatagctattagtataaatattcccatctatactttcataattctaacttctaacataaaaattataaggcatatttattttaatttccagaaacttttcttaaaatagaaaatattttaaagagatttcttatttttctaaaaatcaaatctgctacattaacaaaatagttatctatactttgtttctaaatacagaaatgtaaaacaaacaaacaaacaaacaaaacaaaccaaaacaaaaaaccaaacttttaaacatagtcatgtcaggtcccatcattccccccaccaccaaatttcacaggcctatagtaacattttagtagacacaaaaaatttcttgttaacttttaaagaaattaaaatttaatagtaaatgtagaatattacctttctataagaacttcccatagtaactattatatctatgaaattagaaatcaaatgttataagttattaaaatcattttacattcttttatcgtgaaaacaaatctgaccatatgtctgggtggtcagactaataatctccttattaaaacgcaagtaatcagacaataataaaacaatcaacaatacttgaaattgcaaaaagatgtttcctaccttgcctgcttctctctctaagtagctgtcgccgacatattcccggctaggtgtttgtcgctgttctccctgccagctggccggaaaaaactggagagacagattggttcctgtagccacaaaagccttttagaaaaatcaatacaaacaggatcagaagcaggacattacataaattatgcaggcagtcatttatttttacatcagtttatgtcttaagctaggcagcaccaagaatacttaaaagtaaaaaacatgcactcatcatttttcttaagtattaagttacaaacatctgattccactttaaggacatttgccattggctgcttaaatataaaatcagacatggaatcaatactttatttcaggtcatttttttgctgacgttaggaactcaaattgcttgtgtctaaccagaacctctatccttgcatttaagctttattttcaaatgtgaaaaatcactcatggttttgaatttaaagcataatataaagttgtatatatgagattttttttttcttgagcttttgactcaagaaaatgtaaccatgtgtggtatgtttataaaaacaaaaaccaatgcagtatttaaatatatgtttttaagcatgagctccataacttcgtataggatactttatacgaagttatgttaggctgatgaaatatacgtacagtaccagtaatagaagtaggagctgtagaggaaaaaggattaactcaaggccagtttgggctgcatagtgaggccaccatttttgaagttgttaatcctgggggggtggagggaactaaggataaaggtatcatctactgacattgagcaaatcccctgattgcaagccccttgctttccaatgaatattatgtttctaaagaattgatgcttcaaagtttaattagcaagataaaactggctccagcaaagcggaattcatacctagatgactttaaaacattatatatgatggccacgggccagaaaagggcactggaccctctagaactgaagttacaaatgattgtgagccaccacaagaaggtttagaatccagctcagaccctctgggagagtatacagtgttctagagaactgagccatctctccagcccctgaaatgtattgtgggttttttgttttgttttgtttttgtttttgtttcaagctggtctcacagtgtatctctggctgtcctggaactcattgtgtagaccaggttggcctcaaactcagagaaatctgcctgcttctgcctcccaagtgctgagatgaaaggcatgtgccactgtgcaaagctgaaaatgtgtttttgtttttggggttttgttttgggtttgttttgttttgttttgttttgaaatacagcttttgagctgaagagatggctcagcagttcagagcactggctgctcttccagaggtcctgagttcaattcccagcaaccacatg

SEQ ID NO: 248 - DNA, 2286 bp, synthetic construct
  source 1..2286: mol_type = other DNA
gctcttattcttaatacttctgtctttgcagtaatttttctagtaattaaggttgaaaggtttgctaatttttgtaagtacattgtttattggtttgatttttgttgctttgtaccatgtattatatatagaatgtgagtgttcatcacctgcctttgcttattatagagcagttaatttctatttattttcaataattggaacatacatgttttgtatagtttttttggctccatgatttaggaacttcatatactctacaaatgaaatgttcgatgcattattcttttagatacataaagacttcaggcaatgccactgttgatcacttatccaagtatctggctgtgaggttagctttagaagaacttcgaagcaaaggagaatcaaaccagatgaacctggatacagccagtgagaagcagtacaccatttacatagccacagccagtggccagttcaccgtgagtatttgtcaatgcctgttgagctccttggctagtggtctgggtgggtctggtagggggggagccctgaggcccacgaagcaaagccgcagattaatgactccgtgatgccctttatctctcctgctgtgcacgggatcctgtggccttttgtttatttagtctcactgttactgagcaccatgcattttcataatcttgcctctttttgttttaggttttaaatggctccttttctttggaattggtcagtgagaaatactggaaagtgaacaaacccatggaactttattatgcacccaccaaggagcacaagggcggatccggaggtatggatagcaccgaggcagtgatcaaggagttcatgcggttcaaggtgcacatggagggctccatgaacggccacgagttcgagatcgagggcgagggcgagggccgcccctacgagggcacccagaccgccaagctgagggtgaccaagggtggccccctgcccttctcctgggacatcctgtcccctcagttcatgtacggctccagggccttcacgaagcaccccgccgacatccccgactactggaagcagtccttccccgagggcttcaagtgggagcgcgtgatgaacttcgaggacggcggcgccgtgtccgtggcccaggacacctccctggaggacggcaccctgatctacaaggtgaagctccgcggcaccaacttccctcctgacggccccgtaatgcagaagaagacaatgggctgggaagcatccaccgagcggttgtaccccgaggacgtcgtgctgaagggcgacattaagatggccctgcgcctgaaggacggcggccgctacctggcggacttcaagaccacctacagggccaagaagcccgtgcagatgcccggcgccttcaacatcgaccgcaagttggacatcacatcccacaacgaggactacaccgtggtggaacagtacgaacgctccgtggcccgccactccaccggcggctccggtggctcctgagcttttaaaagtcaattctaagactgaactttttatagtctattcctttactattaaagatgtaccattgttactttcatggacagacctgggatatgttcagttttctttctgagccagacttgtttacactattagattaccgtctccttaatttaaagacagtactttgtggaaaggactctgtgattcagagctcccactccctccatagacgctctaagttgttgcttacagaaaacggggttcctctggggaggagactttgaactaggagttttttgtagttctgtattctttattttttccttccattttttgatattttcagacagtgtctcattattataaagccctggctagcctggaacttgctgagtagaacaggctggccttgactttggagtaatgctcctgcccaagtactgggattctgcctggcttaagattcagttggccatcagccatcttttcccctttcaaaagttttttagcttaaagaatgttagacaatatgtattctgatgttttccccttgaagtcttgtatatttatagttttctatacaaactgtaatatcttcatgaagaccaaggctcaaattactgtgcttaaaacaattctcataggattattattttcatggtattttcttacataatatctcatttaaaggaggttctttatgaacttggtgtccattgtcatgcaatgttttgtttttgtcatgtgtttccactataagtttagaatttcaggtcacggggaaaagtcgaataaagttctttgagaacgtgg

SEQ ID NO: 249 - DNA, 3961 bp, synthetic construct
  source 1..3961: mol_type = other DNA
tgggggaggagacatccacctggaaaccattaatggttaatagctcagtttataaatggagaaaaaggagagaggcattcatgggagtggaaagttaagctttaggttggattctcaatacatctattgttgtaaaactccctggactgagaataggcccaaatgtggaacaccacctgacgggagaggtgatagacactgaaaattaaggatcaaggcaaaggatcaacaaaaagtgtactaaggagttataaaagaactgcagtgttgaggccccagctacagcctcgatttgtggtgtatgtaactaatctgtctggtttcatgagtcatcagacttctaagatcaggaaagggaaaatgccaatgctctgtctaggggttggataagccagtataataaatgaaaatggggctaaaatgagtgttctaaaataccttttgataaggctgcagaaggagcgggagaaatggatatgaagtactgggctctttaaaaatgattaaaattctgcttacatagtctaactcgcgacactgtgaattatagagcccaccgcatccccagcatgcctgctattgtcttcccaatcctcccccttgctgtcctgccccaccccaccccccagaatagaatgacacctactcagacaatgcgatgcaatttcctcattttattaggaaaggacagtgggagtggcaccttccagggtcaaggaaggcacgggggaggggcaaacaacagatggctggcaactagaaggcacagtcgaggctgatcagcggtttaaacttaagctacggtatcgatgcggggaggcggcccaaagggagatccgactcgtctgagggcgaaggcgaagacgcggaagaggccgcagagccggcagcaggccgcgggaaggaaggtccgctggattgagggccgaagggacgtagcagaaggacgtcccgcgcagaatccaggtggcaacacaggcgagcagccaaggaaaggacgatgatttccccgacaacaccacggaattgtcagtgcccaacagccgagcccctgtccagcagcgggcaaggcaggcggcgatgagttccgccgtggcaatagggagggggaaagcgaaagtcccggaaaggagctgacaggtggtggcaatgccccaaccagtgggggttgcgtcagcaaacacagtgcacaccacgccacgttgcctgacaacgggccacaactcctcataaagagacagcaaccaggatttatacaaggaggagaaaatgaaagccatacgggaagcaatagcatgatacaaaggcattaaagcagcgtatccacatagcgtaaaaggagcaacatagttaagaataccagtcaatctttcacaaattttgtaatccagaggttgattatcgataagcttgatatcgaattcttacacctcgttctcgtagcagaacttgtacagctcgtccatgccgccggtggagtggcggccctcggagcgttcgtactgttccaccacggtgtagtcctcgttgtgggaggtgatgtccaacttgcggtccacgttgtaggcgccgggcatctgcacgggcttcttggccttgtaggtggtcttgaagtccgccaggtagcgcccgccgtccttcaggcgcagggccatcttaatgtcgcccttcagcacgccgtcctcggggtacaaccgctcggtggacgcttcccagcccattgtcttcttctgcattacggggccgtcaggagggaagttggtgccgcggagcttcaccttgtagatcagggtgccgtcctccagggaggtgtcctgggtcacggtcacggcgccgccgtcctcgaagttcatcacgcggtcccacttgaagccctcggggaaggactgcttatagtagtcggggatgtcggcggggtgcttggtgaaggccctggagccgtacatgaactgaggggacaggatgtcccaggagaagggcagggggccacccttggtcaccttcagcttggcggtctgggtgccctcgtaggggcggccctcgccctcgccctcgatctcgaactcgtggccgttcatggagccctccatgtgcaccttgaaccgcatgaactccttgatcactgcctcgcccttgctcaccacgttgatgtcgatctggtccagggggatgtactcgccctcgctggtgatcctgctcttggcggccgcagacagtctccgcaggcgctcgccattgctgctcagcctcatatccagctccagcttctggaactcatcctcgtcgtgtcccagctgctccagcagccgaaacagctcctcatcataggtctttctgaaccgggccagggcaaagccgtaacaggacttggccacgatgtcgcacacgcagtgggccacctctgtccagttatcgtcgatccagccgaagcctctagggcagatggcccacaccaggggaaacagaatccacagcatggagaaggtaaacacggcgaacttcagcacgtgcaggctgtgctcggcgcctgtatcctgggccagctgggccagccggctatactgcttggccacgatgctcatcacgatagagtaggcgaagataaaccagaaacagctaaagccataccaggcgtaggcgccattcctcagcctagggtcgccctctgcgtagaactcggccagcacgccagacatcagcatggcaaagatgatggcgctacaagacacgcgatagggggccctcagctgatacagcagatcgtacaccagcattgggcaggtcagcatgtagtcggcatacctgtaattgccgaagccgatgatgaaggggcccacatcgccgaagttgtggcccagtgtgtcggccacgatcttgccgaagtagctcagcatggcaaagaaattcacaaacagggccaggttctgctcctcctgatagccggcgtaaaaggaggttctcttgctagggccccgagatgtccaggactcatagcccaggtagaatgtggtgattgtcagcacgataaagcaagaccagtgggcgccgatggccacggagttcagcttggtatccagataccagccgtccattgtgcccacgtagaacatctggtcggtgcctggtgcgtgtgccatggtggcggatccactcgagtctagaaattcgatctagcttgggctgcaggtcgagggacctaataacttcgtatagcatacattatacgaagttatattaagggttccggatcagcttgatggggatccagacatgataagatacattgatgagtttggacaaaccacaactagaatgcagtgaaaaaaatgctttatttgtgaaatttgtgatgctattgctttatttgtaaccattataagctgcaataaacaagttaacaacaacaattgcattcattttatgtttcaggttcagggggaggtgtgggaggttttttaaagcaagtaaaacctctacaaatgtggtatggctgattatgatcctctagagtcgcagatccagacatgataagatacattgatgagtttggacaaaccacaactagaatgcagtgaaaaaaatgctttatttgtgaaatttgtgatgctattgctttatttgtaaccattataagctgcaataaacaagttaacaacaacaattgcattcattttatgtttcaggttcagggggaggtgtgggaggttttttaaagcaagtaaaacctctacaaatgtggtatggctgattatgatcctctagagtcgcagatccagacatgataagatacattgatgagtttggacaaaccacaactagaatgcagtgaaaaaaatgctttatttgtgaaatttgtgatgctattgctttatttgtaaccattataagctgcaataaacaagttaacaacaacaattgcattcattttatgtttcaggttcagggggaggtgtgggaggtt

SEQ ID NO: 250 - DNA, 3957 bp, synthetic construct
  source 1..3957: mol_type = other DNA
aacctcccacacctccccctgaacctgaaacataaaatgaatgcaattgttgttgttaacttgtttattgcagcttataatggttacaaataaagcaatagcatcacaaatttcacaaataaagcatttttttcactgcattctagttgtggtttgtccaaactcatcaatgtatcttatcatgtctggatctgcgactctagaggatcataatcagccataccacatttgtagaggttttacttgctttaaaaaacctcccacacctccccctgaacctgaaacataaaatgaatgcaattgttgttgttaacttgtttattgcagcttataatggttacaaataaagcaatagcatcacaaatttcacaaataaagcatttttttcactgcattctagttgtggtttgtccaaactcatcaatgtatcttatcatgtctggatctgcgactctagaggatcataatcagccataccacatttgtagaggttttacttgctttaaaaaacctcccacacctccccctgaacctgaaacataaaatgaatgcaattgttgttgttaacttgtttattgcagcttataatggttacaaataaagcaatagcatcacaaatttcacaaataaagcatttttttcactgcattctagttgtggtttgtccaaactcatcaatgtatcttatcatgtctggatccccatcaagctgatccggaacccttaatataacttcgtataatgtatgctatacgaagttattaggtccctcgacctgcagcccaagctagatcgaatttctagactcgagtggatccgccaccatggcacacgcaccaggcaccgaccagatgttctacgtgggcacaatggacggctggtatctggataccaagctgaactccgtggccatcggcgcccactggtcttgctttatcgtgctgacaatcaccacattctacctgggctatgagtcctggacatctcggggccctagcaagagaacctccttttacgccggctatcaggaggagcagaacctggccctgtttgtgaatttctttgccatgctgagctacttcggcaagatcgtggccgacacactgggccacaacttcggcgatgtgggccccttcatcatcggcttcggcaattacaggtatgccgactacatgctgacctgcccaatgctggtgtacgatctgctgtatcagctgagggccccctatcgcgtgtcttgtagcgccatcatctttgccatgctgatgtctggcgtgctggccgagttctacgcagagggcgaccctaggctgaggaatggcgcctacgcctggtatggctttagctgtttctggtttatcttcgcctactctatcgtgatgagcatcgtggccaagcagtatagccggctggcccagctggcccaggatacaggcgccgagcacagcctgcacgtgctgaagttcgccgtgtttaccttctccatgctgtggattctgtttcccctggtgtgggccatctgccctagaggcttcggctggatcgacgataactggacagaggtggcccactgcgtgtgcgacatcgtggccaagtcctgttacggctttgccctggcccggttcagaaagacctatgatgaggagctgtttcggctgctggagcagctgggacacgacgaggatgagttccagaagctggagctggatatgaggctgagcagcaatggcgagcgcctgcggagactgtctgcggccgccaagagcaggatcaccagcgagggcgagtacatccccctggaccagatcgacatcaacgtggtgagcaagggcgaggcagtgatcaaggagttcatgcggttcaaggtgcacatggagggctccatgaacggccacgagttcgagatcgagggcgagggcgagggccgcccctacgagggcacccagaccgccaagctgaaggtgaccaagggtggccccctgcccttctcctgggacatcctgtcccctcagttcatgtacggctccagggccttcaccaagcaccccgccgacatccccgactactataagcagtccttccccgagggcttcaagtgggaccgcgtgatgaacttcgaggacggcggcgccgtgaccgtgacccaggacacctccctggaggacggcaccctgatctacaaggtgaagctccgcggcaccaacttccctcctgacggccccgtaatgcagaagaagacaatgggctgggaagcgtccaccgagcggttgtaccccgaggacggcgtgctgaagggcgacattaagatggccctgcgcctgaaggacggcgggcgctacctggcggacttcaagaccacctacaaggccaagaagcccgtgcagatgcccggcgcctacaacgtggaccgcaagttggacatcacctcccacaacgaggactacaccgtggtggaacagtacgaacgctccgagggccgccactccaccggcggcatggacgagctgtacaagttctgctacgagaacgaggtgtaagaattcgatatcaagcttatcgataatcaacctctggattacaaaatttgtgaaagattgactggtattcttaactatgttgctccttttacgctatgtggatacgctgctttaatgcctttgtatcatgctattgcttcccgtatggctttcattttctcctccttgtataaatcctggttgctgtctctttatgaggagttgtggcccgttgtcaggcaacgtggcgtggtgtgcactgtgtttgctgacgcaacccccactggttggggcattgccaccacctgtcagctcctttccgggactttcgctttccccctccctattgccacggcggaactcatcgccgcctgccttgcccgctgctggacaggggctcggctgttgggcactgacaattccgtggtgttgtcggggaaatcatcgtcctttccttggctgctcgcctgtgttgccacctggattctgcgcgggacgtccttctgctacgtcccttcggccctcaatccagcggaccttccttcccgcggcctgctgccggctctgcggcctcttccgcgtcttcgccttcgccctcagacgagtcggatctccctttgggccgcctccccgcatcgataccgcttaagtttaaaccgctgatcagcctcgactgtgccttctagttgccagccatctgttgtttgcccctcccccgtgccttccttgaccctggaaggtgccactcccactgtcctttcctaataaaatgaggaaattgcatcgcattgtctgagtaggtgtcattctattctggggggtggggtggggcaggacagcaagggggaggattgggaagacaatagcaggcatgctggggatgcggtgggctctataattcacagtgtcgcgagttagactatgtaagcagaattttaatcatttttaaagagcccagtacttcatatccatttctcccgctccttctgcagccttatcaaaaggtattttagaacactcattttagccccattttcatttattatactggcttatccaacccctagacagagcattggcattttccctttcctgatcttagaagtctgatgactcatgaaaccagacagattagttacatacaccacaaatcgaggctgtagctggggcctcaacactgcagttcttttataactccttagtacactttttgttgatcctttgccttgatccttaattttcagtgtctatcacctctcccgtcaggtggtgttccacatttgggcctattctcagtccagggagttttacaacaatagatgtattgagaatccaacctaaagcttaactttccactcccatgaatgcctctctcctttttctccatttataaactgagctattaaccattaatggtttccaggtggatgtctcctccccc

SEQ ID NO: 251 - DNA, 3573 bp, synthetic construct
  source 1..3573: mol_type = other DNA
ggcaccttcctagaaactgtttagttaaaacaagcaggtgatgaacatgaattcagcattcatgccagggacagaagatacatagtggcaaaaagacagatggactttatctaagtacatgtggggcaggaaggcagacagactggatccttttttctacagtgtggcaaatgctacacaaagggaagccaacaggacttttgcccagcaagggatggggatgatattctcagaggagataacacttgaattagcaaaataagagttagcagagcctcaccctccagatgaagaaacaacatgaaccaaggcaaagggccatgggagcaaacacaattcattctggggtaggcagagccattgatgccatcattcaagcatgtccttgctccaagcacagtcctgaaggtacagaaatgaccatcaaaattgaacctaggaaaagctcacctgtctcgtgtcagttctaacttagcctgaggtttccagatatgcatacatctaacaaatgggattggctgctcaagttgggtcaagggtcggggaggcatcaagaagggtcatcctagctcagtaacagtgagatgtgtttgctctgctaagcaccgaagtactcattccctcctaacctatcctcagctgccacccaaaggaaaactccggagcctgtgcagccaacatgtggaaaagctgcagatcttccagcacctccaccccatcgtggtccaagccgccttccctccactctataaggaactcttcagcactgatgttgaatcccctgaggggctgtcaaagggtggcggtggctctggtggcggtggctcttacccatacgatgttccagattacgcttatccctacgacgtgcctgattatgcatacccatatgatgtccccgactatgcctgacccctctccctcccccccccctaacgttactggccgaagccgcttggaataaggccggtgtgcgtttgtctatatgttattttccaccatattgccgtcttttggcaatgtgagggcccggaaacctggccctgtcttcttgacgagcattcctaggggtctttcccctctcgccaaaggaatgcaaggtctgttgaatgtcgtgaaggaagcagttcctctggaagcttcttgaagacaaacaacgtctgtagcgaccctttgcaggcagcggaaccccccacctggcgacaggtgcctctgcggccaaaagccacgtgtataagatacacctgcaaaggcggcacaaccccagtgccacgttgtgagttggatagttgtggaaagagtcaaatggctctcctcaagcgtattcaacaaggggctgaaggatgcccagaaggtaccccattgtatgggatctgatctggggcctcggtacacatgctttacatgtgtttagtcgaggttaaaaaaacgtctaggccccccgaaccacggggacgtggttttcctttgaaaaacacgatgataatatggccacaaccatgaaccggggagtcccttttaggcacttgcttctggtgctgcaactggcgctcctcccagcagccactcagggaaagaaagtggtgctgggcaaaaaaggggatacagtggaactgacctgtacagcttcccagaagaagagcatacaattccactggaaaaactccaaccagataaagattctgggaaatcagggctccttcttaactaaaggtccatccaagctgaatgatcgcgctgactcaagaagaagcctttgggaccaaggaaactttcccctgatcatcaagaatcttaagatagaagactcagatacttacatctgtgaagtggaggaccagaaggaggaggtgcaattgctagtgttcggattgactgccaactctgacacccacctgcttcaggggcagagcctgaccctgaccttggagagcccccctggtagtagcccctcagtgcaatgtaggagtccaaggggtaaaaacatacagggggggaagaccctctccgtgtctcagctggagctccaggatagtggcacctggacatgcactgtcttgcagaaccagaagaaggtggagttcaaaatagacatcgtggtgctagctttccagaaggcctccagcatagtctataagaaagagggggaacaggtggagttctccttcccactcgcctttacagttgaaaagctgacgggcagtggcgagctgtggtggcaggcggagagggcttcctcctccaagtcttggatcacctttgacctgaagaacaaggaagtgtctgtaaaacgggttacccaggaccctaagctccagatgggcaagaagctcccgctccacctcaccctgccccaggccttgcctcagtatgctggctctggaaacctcaccctggcccttgaagcgaaaacaggaaagttgcatcaggaagtgaacctggtggtgatgagagccactcagctccagaaaaatttgacctgtgaggtgtggggacccacctcccctaagctgatgctgagtttgaaactggagaacaaggaggcaaaggtctcgaagcgggagaaggcggtgtgggtgctgaaccctgaggcggggatgtggcagtgtctgctgagtgactcgggacaggtcctgctggaatccaacatcaaggttctgcccacatggtccaccccggtgcagccaatggccctgattgtgctggggggcgtcgccggcctcctgcttttcattgggctaggcatcttcttctgtgtcaggtgccggcaccgatgatctggaggaaggacaactttctatttccttcagccctctgacccgtctccctggactcccttcacccagcctttccctttctgcactctatgaagggtggtatccctaggagtaagcaaatcctaagactgattttctgcccctaggcttgccttgtaggacaacagcagcaagtgatggagaaaaggcttgttatgtttgatttcccataagttccaccctggcttctggaagctgtggggtagatgggatagagataggatgaccaagtcaaataaaaaacagactgacaatcagcagggataaatccaggtacctgggataaggagaactcaaatctaggcttgaaagctaataacagtcctttcaatacctcattgtatttccccatgggtcctcctggggggacatggatctagctcagagactggtggcaagcccccagaaggacctgtatataataagaatatagattcctgagacttttctgcctttcttcttcctagttaagaaatgttgttgaccccctctgcctgttttctgggacctaaaatgcctggatgtgtaaagaatgagggtggggtggagataaggtcccaagataactgttttatggggtttgggtatgaagaaaaacatcactggaaaaattagaatggaaacctctttgcacactttaaaagtgtcagattcgttagcagtctaatcagagacacacatccacacaggtggagcacacagaggctctgcccccagtgacaccattctgtagactttccctctggcacacaatctc

SEQ ID NO: 252 - DNA, 3095 bp, synthetic construct
  source 1..3095: mol_type = other DNA
ggaagagcagtagggtggtcttacccactgagccatctcaccagccctattttttttctttaagttcagtgtagtagtacatgtctttagtcccagaatttagtaggcagaagcaggcagatctctgtgagttcaacaccggcctggcccacagagctcagaacagcgaggactacataaggagaccctgtctcaaaaacaaacaaacaaaaaacccacaaaggtctggagaggtggctcagcagttaagagcactgactgctcttccagaggtcctgagttcaattcccagcaaccacatggtggttcataaccatctgtaattggatccaatgccctcttctggtgtgtcagaaacagtgacaatatactcattatacaataaataaatctttaaaaaacaaaaacaaaagaattttaaaaataattacgtttatgtgtctaggaagaaaaatgtcgatgtggagatgtggagatgtggaggtgggggtgggtatagaggctcggcaggtgtactgatttgtcaaaacccaggtcgctggcaagggtctccatccaatcaatgctgaccgctgctctctgcttccctagaacctgaaggctgccaacactgaccctactgccccgccctacgactccctgctggtttttgactacgagggcagcggctctgatgccgcctccctgagctccctcaccacctccgcctccgaccaggatcaggactacaactaccttaacgagtggggaagtcgattcaagaaactggcggacatgtatggtggcggtgaggatgacggaagcggagctactaacttcagcctgctgaagcaggctggagacgtggaggagaaccctggacctatggtgagcaagggcgaggaggtcatcaaagagttcatgcgcttcaaggtgcgcatggagggctccatgaacggccacgagttcgagatcgagggcgagggcgagggccgcccctacgagggcacccagaccgccaagctgaaggtgaccaagggcggccccctgcccttcgcctgggacatcctgtccccccagttcatgtacggctccaaggcgtacgtgaagcaccccgccgacatccccgattacaagaagctgtccttccccgagggcttcaagtgggagcgcgtgatgaacttcgaggacggcggtctggtgaccgtgacccaggactcctccctgcaggacggcacgctgatctacaaggtgaagatgcgcggcaccaacttcccccccgacggccccgtaatgcagaagaagaccatgggctgggaggcctccaccgagcgcctgtacccccgcgacggcgtgctgaagggcgagatccaccaggccctgaagctgaaggacggcggccactacctggtggagttcaagaccatctacatggccaagaagcccgtgcaactgcccggctactactacgtggacaccaagctggacatcacctcccacaacgaggactacaccatcgtggaacagtacgagcgctccgagggccgccaccacctgttcctggggcatggcaccggcagcaccggcagcggcagctccggcaccgcctcctccgaggacaacaacatggccgtcatcaaagagttcatgcgcttcaaggtgcgcatggagggctccatgaacggccacgagttcgagatcgagggcgagggcgagggccgcccctacgagggcacccagaccgccaagctgaaggtgaccaagggcggccccctgcccttcgcctgggacatcctgtccccccagttcatgtacggctccaaggcgtacgtgaagcaccccgccgacatccccgattacaagaagctgtccttccccgagggcttcaagtgggagcgcgtgatgaacttcgaggacggcggtctggtgaccgtgacccaggactcctccctgcaggacggcacgctgatctacaaggtgaagatgcgcggcaccaacttcccccccgacggccccgtaatgcagaagaagaccatgggctgggaggcctccaccgagcgcctgtacccccgcgacggcgtgctgaagggcgagatccaccaggccctgaagctgaaggacggcggccactacctggtggagttcaagaccatctacatggccaagaagcccgtgcaactgcccggctactactacgtggacaccaagctggacatcacctcccacaacgaggactacaccatcgtggaacagtacgagcgctccgagggccgccaccacctgttcctgtacggcatggacgagctgtacaagtaataggctgtccctgccaagctgtccaggcaagaactacagacgggtcacagcagcatctcaagggagcctggctcccgctccagccaggactctgaagtttgcccagaagtggcctgcgtggcacgctgcatctgaccagaaggctggactgtgagcctttccgatggaaggatgtgactctgacgacaacactgatccccacctcagccatggctgagcccctctcagagcgggaatgtctaaaggtctcccgcctgccacacagcactcagctctgccctctcagggcttgaacttgctccgatgccctcggtgactttccccacttggaatggctccctctctttagaaagaggcccctaactaaggccctgtttttctttaatgcagttttcaaaaagaggctggggtgggtggggcagggtgcggacatcagtgtcccctcaggccctccagaagagaagcctacagggcactggccctggtacatttctctgacatttcttgaggcctcacattggggaggggtcactgccttttttttttttttaatactgagtatatctaagttgtctcgtatttttttattttccctgttatgtgctgtagatggagagtgatgacaatcgtgtaaatgtactagaatttttttattaaaatgaacttttttttttcccagaggtgctaggggagtggatttaaaaagactttttaacctagttctcagaagtgtttggcttggtgggttttagattttttacaagatttgcagacgccctcgcttccacccaacttccccc

SEQ ID NO: 253 - DNA, 4473 bp, synthetic construct
  source 1..4473: mol_type = other DNA
ctgattggctctcggggcccagaaaactggcccttgccattggctcgtgttcgtgcaagttgagtccatccgccggccagcgggggcggcgaggaggcgctcccaggttccggccctcccctcggccccgcgccgcagagtctggccgcgcgcccctgcgcaacgtggcaggaagcgcgcgctgggggcggggacgggcagtagggctgagcggctgcggggcgggtgcaagcacgtttccgacttgagttgcctcaagaggggcgtgctgagccagacctccatcgcgcactccggggagtggagggaaggagcgagggctcagttgggctgttttggaggcaggaagcacttgctctcccaaagtcgctctgagttgttatcagtaagggagctgcagtggagtaggcggggagaaggccgcacccttctccggaggggggaggggagtgttgcaatacctttctgggagttctctgctgcctcctggcttctgaggaccgccctgggcctgggagaatcccttccccctcttccctcgtgatctgcaactccagtctttctagaagatgataacttcgtataatgtatgctatacgaagttatgggtaggggaggcgcttttcccaaggcagtctggagcatgcgctttagcagccccgctgggcacttggcgctacacaagtggcctctggcctcgcacacattccacatccaccggtaggcgccaaccggctccgttctttggtggccccttcgcgccaccttctactcctcccctagtcaggaagttcccccccgccccgcagctcgcgtcgtgcaggacgtgacaaatggaagtagcacgtctcactagtctcgtgcagatggacagcaccgctgagcaatggaagcgggtaggcctttggggcagcggccaatagcagctttgctccttcgctttctgggctcagaggctgggaaggggtgggtccgggggcgggctcaggggcgggctcaggggcggggcgggcgcccgaaggtcctccggaggcccggcattctgcacgcttcaaaagcgcacgtctgccgcgctgttctcctcttcctcatctccgggcctttcgacctcaattgcgccaccatggaagccgtggctgtcgcagctgctgtgggagtcctgctgctggcaggagctggaggtgctgcaggcgacgaggctagggaagctgcagccgtgcgggctctggtcgcaagactgctgggaccaggacctgctgctgatttctccgtgagcgtcgagcgagcactggctgctaagccaggtctggacacctactctctgggaggaggaggtgcagcccgagtgcgtgtcaggggaagtacaggagtggctgcagctgctggactgcaccgatatctgagagatttttgcggttgtcatgtcgcatggtcaggatcccagctgcgactgccacgacctctgccagctgtgccaggagaactgactgaggctacccctaaccgttacaggtattaccagaatgtctgcacacagagctattctttcgtgtggtgggactgggcacggtgggaaagagagatcgattggatggccctgaacgggattaatctggctctggcatggagtggtcaggaagccatctggcagcgcgtctacctggctctgggcctgactcaggcagagattaacgaatttttcaccggaccagcctttctggcttgggggcgaatgggtaatctgcacacatgggacggccccctgcctccatcatggcatatcaaacagctgtatctgcagcaccgtgtgctggatcagatgaggtccttcggaatgactcccgtcctgcctgcatttgccgggcatgtgccagaggctgtcacccgggtgttcccccaggtcaacgtgacaaagatgggtagctggggccactttaattgttcttacagttgctcattcctgctggcacctgaagacccaatttttcccatcattggatccctgttcctgagagagctgatcaaagaatttgggactgatcatatctacggtgccgacaccttcaacgagatgcagcctccaagctctgaacccagttacctggctgcagccacaactgctgtctatgaggcaatgaccgccgtggatacagaagctgtctggctgctgcagggctggctgtttcagcaccagcctcagttctggggaccagcacagatccgagctgtgctgggagctgtcccacgaggtcgtctgctggtgctggacctgtttgcagagtcacagcctgtctacactaggaccgcctccttccagggccagcccttcatctggtgtatgctgcataatttcggagggaaccacggtctgtttggcgctctggaagcagtgaatggagggcccgaggccgctcggctgttccctaacagcacaatggtcggtactggcatggcaccagaaggaatctctcagaatgaggtggtctatagtctgatggccgaactggggtggagaaaggatcccgtgcctgacctggctgcatgggtcacctcatttgccgctcgccgatacggtgtgtcccatccagatgcaggcgccgcttggcgtctgctgctgaggagcgtctataactgctctggagaggcatgtcgggggcacaatagaagtcccctggtgcgccgaccttcactgcagatgaacacatccatttggtacaatcgtagcgacgtcttcgaagcctggaggctgctgctgacttctgctccaagtctggcaacctcacccgcctttcggtatgatctgctggacctgacaagacaggctgtgcaggagctggtgtccctgtactatgaagaggcacgcagcgcttacctgtctaaagaactggccagtctgctgcgagctggtggcgtgctggcctatgagctgctgcctgctctggatgaagtgctggcctcagactcccgtttcctgctgggaagctggctggagcaggctagagccgctgccgtgtctgaagctgaggccgatttttacgaacagaacagtcgctatcagctgactctgtgggggccagagggtaatatcctggactacgctaacaagcagctggccggcctggtggctaattattacaccccccgatggcggctgttcctggaagccctggtggattcagtggctcagggcattccttttcagcagcatcagttcgacaaaaacgtgtttcagctggagcaggccttcgtgctgagcaagcagagatatccatctcagccccgcggggatacagtggacctggctaaaaagatctttctgaaatactatcctagatgggtggctggtagttggggcggtggcggtggcggtaacaacatgttgatccccattgctgtgggcggtgccctggcagggctggtcctcatcgtcctcattgcctacctcattggcaggaagaggagtcacgccggctatcagaccatcgaacaaaaactcatctcagaagaggatctgtaatgactgtgccttctagttgccagccatctgttgtttgcccctcccccgtgccttccttgaccctggaaggtgccactcccactgtcctttcctaataaaatgaggaaattgcatcgcattgtctgagtaggtgtcattctattctggggggtggggtggggcaggacagcaagggggaggattgggaagacaatggcaggcatgctggggatgcggtgggctctatggtctgggataacttcgtataatgtatgctatacgaagttatcattctgggcaggcttaaaggctaacctggtgtgtgggcgttgtcctgcaggggaattgaacaggtgtaaaattggagggacaagacttcccacagattttcggttttgtcgggaagttttttaataggggcaaataaggaaaatgggaggataggtagtcatctggggttttatgcagcaaaactacaggttattattgcttgtgatccgcctcggagtattttccatcgaggtagattaaagacatgctcacccgagttttatactctcctgcttgagatccttactacagtatgaaattacagtgtcgcgagttagactatgtaagcagaattttaatcatttttaaagagcccagtacttcatatccatttctcccgctccttctgcagccttatcaaaaggtattttagaacactcattttagccccattttcatttattatactggcttatccaacccctagacagagcattggcattttccctttcctgatcttagaagtctgatgactcatgaaaccagacagattagttacatacaccacaaatcgaggctgtagctggggcctcaacactgcagttcttttataactccttagtacactttttgttgatcctttgccttgatccttaattttcagtgtctatcacctctcccgtcaggtggtgttccacatttgggcc

SEQ ID NO: 254 - DNA, 4180 bp, synthetic construct
  source 1..4180: mol_type = other DNA
cagagcaaatgggttctacaggcctaacaacctatctataaagccaacttggtggtagaaagaatctcttgagctgaatcttgaatgacagctcaagggatagggaggacagggtgttcagaagcagagaagatgccttgtaaatgtggaaggctgtggcaggattggaaggactttggggtggtaggaaggggatgggaatgggtggttacaagagaaacaagactgtagtaaataaagctgaaactcaaagcaagctttcagcatctttaattggagacacaaacttcaaaggtatcatgaatgtggttgatcttggtgaaagttgagcttcacctgtcctaacaacagaccaatccatgagtgaaagcttatctttctcctttattaatggttgctgttgtatccataactcaattccaaaggatatgaaccttaacatatagatataattttgtgtaccttctatgaaacagcattaaagcaaagaagttcaaatagaaagactggcttagttattattaactaagagatgctagtgagttctaaattaataccatttaaaatttataatttgcagaattaccaccaccaccaccactcagcccaggaaaagttacaaagaactggctatccaatttgtttgttttcctcctttttagagttcttttatttatgtgtgagtgaatgccatgtacttatggatgcagaggctgtcagattccttgcagctggagtaatagacagttgtgagctacttatagtactagaactaagatcctatggaagagcagcgagtgccactaactgctgagccacctctccagcccatttctttatttttcaatgaacaaataataagcagtcctatgtgacatgcttctaaagcaaaagatataatatttagtattatatacattaataataaaatacattatcttctaagaattgaagtctcaactatgaaaatcagcagttctctgtcagagaagcccaagcgcttccacgcatgcttggagagggggttaagctttcgcagctacccactgctctgttcctcttcagtgaggagggtttttgtacagccagacagtggagtactaccactgtggtgcacagcaagactcactgtccaatatgcttgcttatttgaattacataacaccaaggtagatctagtacccttagtggtaatatataaaaactatcttcacaacaataatgggggatcctttaattctaaagaaacaagtatatgactaacaactaactgctgaacacaaacaaagaaagatgagatcatgggttaccttgaagtaaaagtagccatttatttacagctgtgtgctcaaaaaaagtaacttaaaattcactttaatttaagaattgttagatcagcagtctcaataagtgtatctattcagagtctctcatttatttttctaattcttgatacacaatggaattagtcttttgtgaagaaaagaatgagaaagaaattcttaaggaagatctagagacatacacttgcttcctcatggctatgctaaatttgaagttatatgaacattattgaaatttgctgtaaggtaaggtaaaactttgatcaaacttatacacaaattttccaattcaggaggtgtcatcctttaataattaaaatttaatctatttgaaaagtgtgctcaaatatttccagataattatatgacatgaactaaactataacagagcagagtgtatactgaggatggtagatacttagatgtgtttcagatagtgcatcttcatgatgcactgtgaaatctagcattagttagtatcctcaactaatttagtttctttaaactttcacagtgttttcacccatttcaatgtgaaagtgtatttttctattcgcctaaatgtggcttcagtgcctgatgattggagaattatttgtgagcacacctcagctttagatcacacacatggatactggctttcagagtgcattgtgaacaagactggaatgtaagatacctactaagcagcttcaaggaagagaggaaccagataatgctctcggaatattataaacagtttgagagagaagtatacctcaaagtactcaattgaacatcccttgtttagtgtatcaaatcaagctggtcttaagagaaatcaatgaacaatactttgtgacagatatgcaccacaaaagaggaagagaaaaacagaaatttccttctttgtaagtgtagtgtctacaaataagtagatattgtcctagattagccaggtttgcctttgttaacagaccacctgactttataagccgagaactccaaagactactatttgcatagttcatcctcagaaaccacaaatttctcacagttgttttaaagagatgcacttataggaagagcaataattagtcagagaccaggatcaaaaacacaatggattttcatgtgcagattttcagcttcatgctaatcagtgtcacaggtagagatgggtaggagtttgagttcagaaaacaaggttctttttcccaggaaagtttcataaagtagactttttctttcctctgaatattgaatgctatgaaattatttttgtatctctgtctactaacaccctctatctctttcactctctcttctgttgtttttccatagtcatattgtccagtggacagactgtgctgacgcagccgccctcagtgtctggggccccagggcagagggtcaccatctcctgcactgggagcaactccaacatcggggcaggttatgatgtacactggtaccagcagcttccaggaacagcccccaaactcctcatcgttggtaacagcaatcggccctcaggggtccctgaccgattctctggctccaagtctggcacctcagcctccctggccatcactgggctccaggctgaggatgaggctgattattactgccagtcctatgacagcagcctgagtgaaccgacttgggtgttcggcggagggaccaagctgaccgtcctaggtaagtacacttttctcatctttttttatgtgtaagacacaggttttcatgttaggagttaaagtcagttcagaaaatcttgagaaaatggagagggctcattatcagttgacgtggcatacagtgtcagattttctgtttatcaagctagtgagattaggggcaaaaagaggctttagttgagaggaaagtaattaatactatggtcaccatccaagagattggatcggagaataagcatgagtagttattgagatctgggtctgactgcaggtagcgtggtcttctagacgtttaagtgggagatttggaggggatgaggaatgaaggaacttcaggatagaaaagggctgaagtcaagttcagctcctaaaatggatgtgggagcaaactttgaagataaactgaatgacccagaggatgaaacagcgcagatcaaagaggggcctggagctctgagaagagaaggagactcatccgtgttgagtttccacaagtactgtcttgagttttgcaataaaagtgggatagcagagttgagtgagccgtaggctgagttctctcttttgtctcctaagtttttatgactacaaaaatcagtagtatgtcctgaaataatcattaagctgtttgaaagtatgactgcttgccatgtagataccatggcttgctgaataatcagaagaggtgtgactcttattctaaaatttgtcacaaaatgtcaaaatgagagactctgtaggaacgagtccttgacagacagctcaaggggtttttttcctttgtctcatttctacatgaaagtaaatttgaaatgatcttttttattataagagtagaaatacagttgggtttgaactatatgttttaatggccacggttttgtaagacatttggtcctttgttttcccagttattactcgattgtaattttatatcgccagcaatggactgaaacggtccgcaacctcttctttacaactgggtgacctcgcggctgtgccagccatttggcgttcaccctgccgctaagggccatgtgaacccccgcggtagcatcccttgctccgcgtggaccactttcctgaggcacagtgataggaacagagccactaatctgaagagaacagagatgtgacagactacactaatgtgag

SEQ ID NO: 255 - DNA, 4455 bp, synthetic construct
  source 1..4455: mol_type = other DNA
gtacctgccatgcccctgttagtaactgagtactacagcaggagcaggtgttctctagaaagcctgagacaactctacttcttctctcaagagaccacctaatacaggcctgagagaacagactctggaaatagatgggacttacggagctaagatctagagctcatctacagagcagaatcccagccaagagaacaaagaatactgactctctcctgttccctactcctagagttctaaaacacactatagggaagggagcctctagacctccgtccattccccatcttgctcattccatcttcccatgtccccaggtctccaagccacagacaccacctttcctattcacccacctttctgtgtccctaggtccccaggccatagtcacctccccccacaccccgctcaccctgccccatctatgcccctagatgcttacttaccagagtcttttgtctgacgtggggctacaagcatctatgctccctaagcacctactgctgacctgtaggacccagctctgaaccaactcatataagtaaatacagactctcccctgtcttaggatggccccctgggtcaggaggagaccactgccaaggaaccttctcttagagcactgaactcctcccctgtaccacttaggacagacctgagacctattattactgattaccagagctctggcagtgaccacggaggagatagatccaccctggacacaggaaacacagcaccagagatactgcttcatcacaacagtagagtgacactttagactttaatttgggtcactttcctgctgtagaggtgggatcagaaagcaaagagcagtatgagtgcctgataggcacccaagtacactatagagtactcatggtgaataaggtacctccatggcttcccagggaggggcactgccccacccccaccatcacagacctttctccatagttgataactcagacacaagtgaatgacagatggacctccatctgctcttattttaaaaagaagacaaaccccacaggctcgagaactttagcgactgttttgagagaaatcattggtccctgactcaagagatgactggcagattggggatcagaatacccatactctgtggctagtgtgaggtttaagcctcagagtccctgtggtctctgactggtgcaaggttttgactaagcggagcaccacagtgcctagatttaccagcacaggtgcacagaaatcaaacccgtgaatatttccacatgagagacctcgaaatgaatgagcaggtagacatgtctactggtaagcttagccacatcagttaaatgccgtagaattgaagtacataagtcatcctctgaggttaatgtgtcccacttggtgcaggtgtattctgctatcaccactaagaataatgttaacaattacaaaattacaacatggaagggaggtgctcttgaggaaccacagcaagctgggggtctcttggcatttgatgactggtgggcaaaatatcatgtctttgttttggggaagatttctggaggttcactctttactagtgacgagcctatctatgtgtatataggtagtagtaattaaattcactgtgtctttagctaatgaagcagaagaggtcaggatgttaggaaagagacttactggaaagttccaaggggaaaacagggacctagtgttggtagatcgtggttcagagagtggtggttgatcatagcatatttcatatatgattgaaaatttcaaagaataaaaatccctatgaaatatagaaataacaactttacaaatatatagaatttttatagaggtgtattttgtacaatgtgcatatttctccagtaacatcttgttcctcctattttccctcttttctacttgacagttggaacatcatcatgtatatgtaaacatagttgtctattgttatgaaaatatatgttaataataagagtaacatttaatgtttttgattttgagatcatattaattaatatagttatatctaattccattcattttttccagaatcagtgtaaatttctggtaaaaatcatttatttgaaatctatgacttagtgataaaatcctttgttgacacatctatagtttatatctataatttagttaatcatggtattggtgtaataatcactgatgtgtaaatatacatgtacttttatccattttagtgaattttgaagtacataacctgtggtaaaggcaaatattacttgaacgtatcttaaagaaggttctaatatctaaagttagccacttttggaatttaccatcagatcatcatcatcatcatcatcatcatcatcatcatcatcatcatgatgctcacaaagcaccatcgctaaatccatgtgttaatattgtcctaaagtggagcagcagactcaggccaaaaatttattgagaacttagtccctgaagttacatccacaacatctggccagggctcagggaaagtgtttgggatgcttttcctcagggaggattatgacttggaccctagcatcctgctgcatgacccatgtgccttttcagtgctttctccctagttcttctccagctggactaggtcattaactaagaaatgcactgctcatgaatatgcaaattacttgagcctatggtagtaaatacaggcatgcccacactgtgaaaacaacatatgactcctgtcttctccacagtcccagaacacactcactctaaccatggaatggccttgtatctttctcttcctcctgtcagtaactgaaggtaaggagctcagcagttccaatctgaagaggagatagggcctgaggtgacaatgacatccacaatttctttctcccgacaggtgtccactcccaggtacagctggtgcaatctggggctgaggtgaagaagcctgggtcctcggtgaaggtctcctgcaaggcttctgggggcatcgacaacacctatactatcagctgggtgcgacaggcccctgggcaagggcttgagtggatgggaaggatcatccttatgtctggtagggcaaactacgcacagaagatccagggcagagtcacgataaccgcggacaaatcgacgagcacagcctacatggagctgaccagcctgagatctgacgacacggccgtctattactgtgcgagaggcttcaacagcaactattatggttggggggacgatgatgcttttgatttctggggccaagggacactggtcaccgtctcttcaggtaagaatggcctctccaggtctttatttttaacctttgttatggagttttctgagcattgcagactaatcttggatatttgtccctgagggagccggctgagagaagttgggaaataaactgtctagggatctcagagcctttaggacagattatctccacatctttgaaaaactaagaatctgtgtgatggtgttggtggagtccctggatgatgggatagggactttggaggctcatttgaagaagatgctaaaacaatcctatggctggagggatagttggggctgtagttggagattttcagtttttagaataaaagtattagttgtggaatatacttcaggaccacctctgtgacagcatttatacagtatccgatgcatagggacaaagagtggagtggggcactttctttagatttgtgaggaatgttccgcactagattgtttaaaacttcatttgttggaaggagagctgtcttagtgattgagtcaagggagaaaggcatctagcctcggtctcaaaagggtagttgctgtctagagaggtctggtggagcctgcaaaagtccagctttcaaaggaacacagaagtatgtgtatggaatattagaagatgttgcttttactcttaagttggttcctaggaaaaatagttaaatactgtgactttaaaatgtgagagggttttcaagtactcatttttttaaatgtccaaaattcttgtcaatcagtttgaggtcttgtttgtgtagaactgatattacttaaagtttaaccgaggaatgggagtgaggctctctcataacctattcagaactgacttttaacaataataaattaagtttcaaatatttttaaatgaattgagcaatgttgagttggagtcaagatggccgatcagaaccagaacacctgcagcagctggcaggaagcaggtcatgtggcaaggctatttggggaagggaaaataaaaccactaggtaaacttgtagctgtggtttgaagaagtggttttgaaacactctgtccagccccaccaaaccgaaagtccaggctgagcaaaacaccacctgggtaatttgcatttctaaaataagttgaggattcagccgaaactggagaggtcctcttttaacttattgagttcaaccttttaattttagcttgagtagttctagtttcccc

SEQ ID NO: 256 - DNA, 2252 bp, synthetic construct
  source 1..2252: mol_type = other DNA
ccctgtaccttataagttcaggagtgataacagtcctcatgaacacagattttggatccatgggaacagtgtggcttccttccatctgtagctgatggcttatgccctttcttgggccaggttgtgtctccatccatttccctatcatttcctatcacatgcatgcgcaggcatgtatgtcagtgtatgaagactgggatctatatgcattatgtatattttgtatattgtgtattacgtgtgtgtgtacctatgtgtagcctatatggaaaggtatacatgtattaaattatactatgtttactcacatataacacatggaaggatgtgttgtatacttgtgtgtgtgtttatgtgtaccacacatggatggggatgtgtgtgctctaacataactgtagtgtacatgtgttttgtggagaacagattttgctgattattacatgagctgagggggatcattgtagcccattgtggaactatccaagccgattcccctgcatcatcctgcaaaccactttttgttttgttttgtttttaaagacagggtttctctgtatagctctggctatcctggaactaactctgtagaccaggctggccttgaactcagaaatctgcctgcctctgcctcccatgtgctgggattaaaggtgtgcgccaccactacccagcacaaacccacttctaagtactccatgagcaccaatcttaagatatccctttcactgatagtacccaaactgtcccgatctcccccgcagcaggctgcagacttgttttctggccaggtttgataggaccctctcttctgttcccttagcattcttctggaagatgggaaggccacagtgccctgcctggcagagagactgactgaggagctcacctcccacatctgtaaatcactgccactattggaagatcaaataaatagcagtcatcagagtgcaagcgaggagctgcagaagtacggtgcagacataccagaagatgacagaacgaggatgtcctttctggtgaataaaatcagtgccttcaataggaatatcatgaatttgatacaagcacaggaaaccgtatcagagggagacagccggttgtttaccaaactgcgaaatgagtttcttgcttgggatgatcatattgaggaatattttaaaaaagattctcctgaggtacaaagcaagatgaaagaatttgaaaatcagtatcgtggccgggagctgccagggtttgtggactacaaggcatttgagagcatcatcaaaaagcgagtcaaagccctggaagagtctgctgtgaacatgctgcgcagggtcactaagatggtgcaaactgcattcgtaaagattttatcaaatgattttggtgattttttaaacctctgctgtactgctaaggtaaatccaaatacattttatttttaagagaataataaataagcatgacatggaaccagatttcttggtttgagacctttccaactttcttgtgtctgttaagagaagtgaaggctcaaatatatgtttgtgttttcaagacaatgtaacaacaggccttctggttaaaacgggtttgagaacagaaagagaggaggggatgaattcagagaccgcaggtccagaaagccttgtcaggcagaagcattttccatgcagagaaaggggcccttactctgaacactccacaggaacatgaaatataataaaagtgggatggacctgtttgccgttcttgatgttccttgagagatgtttacttatggctgagtgcatagcaagaagagcctgacagagggtttgctctggcttatagtctgtgatgccagagaaggctgaatcctacactcagctctttgtcctttttacttactctagaactccaatccatgggatagtgttgccctaagagggcgggtcttcccatctcatttaaacctccctggaaacattgtcatactaagagactagttccctgagtgtttctaaattcaatcaggttgacattagagactgagtctcgcagctgaggggagactcacttctggctcgggtgtcccctggttcctacccttagccagtagaatagtataaagaagctgatcaagggggtcctggggctgttcccaggtgatacctgtgtttggtcttgctggttggtctgattttcatggatgcatcgagcagcctgtgttcttactctctgttaacctttcttgaagtttgttgactgtatttctctccctgcag

SEQ ID NO: 257 - DNA, 2370 bp, synthetic construct
  source 1..2370: mol_type = other DNA
gactgtgagcattcaaggctcaacagcagcagctccaggggtttcacaggtaataaatatctggggtcagtagggtttgtactctggagcacttattgggtaaagaacatgactttcttgcacttaaaaaaatatatttgtttaaaaaacaagataggtaacaatctattttttcttcaatatttaaatcattcaggattattataaggatccagtgaaatagagcagacagaagtaaaaaatggctcagacttatagattctctttaaaagatgcagcctccatttgaatgcattactgcacttaatactcatttttaagggtctgtcacagtgacagagttgccagaactcagcaaacttttaaacaggagctagactgttgtgggcaaacaatgacttcaggaaccgcaaagtgggccaagtgctcaaatgtcagaagcgagctgccgcagccctcagtgcctccgccactctttcctcgaagaggaccagcctgaggtacacaccaaaagtactgccagagggtaacccactcagcccctcattccagcagaactcctgcacccgctccaggctcttataaaagcctgggagaatcacacagcacttacaatgtggccacaccaaggtaccatgccagtctatatgaaaacaacagactgctatttaagtcaagaaattgttctgtgtgaaagtggggtactctgagccctcctcttctgaggacagctcctcatcctgggtaaagatgctccctaatccatactcctgttcgtgaacagaaacttcatttggcgtcaaatggaagcctccggaccctcccttgtacagctcgtccatgccgagagtgatcccggcggcggtcacgaactccagcaggaccatgtgatcgcgcttctcgttggggtctttgctcagggcggactgggtgctcaggtagtggttgtcgggcagcagcacggggccgtcgccgatgggggtgttctgctggtagtggtcggcgagctgcacgctgccgtcctcgatgttgtggcggatcttgaagttcaccttgatgccgttcttctgcttgtcggccatgatatagacgttgtggctgttgtagttgtactccagcttgtgccccaggatgttgccgtcctccttgaagtcgatgcccttcagctcgatgcggttcaccagggtgtcgccctcgaacttcacctcggcgcgggtcttgtagttgccgtcgtccttgaagaagatggtgcgctcctggacgtagccttcgggcatggcggacttgaagaagtcgtgctgcttcatgtggtcggggtagcggctgaagcactgcacgccgtaggtcagggtggtcacgagggtgggccagggcacgggcagcttgccggtggtgcagatgaacttcagggtcagcttgccgtaggtggcatcgccctcgccctcgccggacacgctgaacttgtggccgtttacgtcgccgtccagctcgaccaggatgggcaccaccccggtgaacagctcctcgcccttgctcaccatacctccagagccacctcctccactaccgccttcctgtaaagccttttgggtctccacctctccttgtatccgatactcttcttctgtcaggaggcgaggggggacaggctttcctgatgccttacacatccttctgtgctcaccaaaataacaccatgagtcattaatcagtatccacaccatccttatgtccacttgtcccaggagacaaccacactaagataagactcagcatcgacagtcatcacccagctttcttccacacacacccttcattacagtgtactatcgtgccaaacatgagtgaaaagccagagtagtcaaactcacttattttcaaataaatgacaaataatttattttccaataagtgggaaaacaacaaaatgatgttataatgttgtggtttgtgacctcaggtcctcactctgaaggtactgttttgattacctgcaatggagcagccatggccatttcagaatccagggccactccatattgacttttccaagaataccatgctatgaattacatctcaaataaaattaaggttttagagcaacttgacagtcagcgtgacatgatctgaaacctgaacttgaggcctatgtacaaaccaaacactgatataatttgcaccacctagtggtagcaggaacacatgacactttactggttgcttttattataaaaaaagaaaaaaagtattatctcaacagagaaaggaacaagggtgggagcaggtgacatcccacttacagaggttcccaaggaaaaactaagcatcctttcgctgcaagtgcatcccataccccacatgtcaacagtc

SEQ ID NO: 258 - DNA, 3341 bp, synthetic construct
  source 1..3341: mol_type = other DNA
gtcccttgttctagttttgaaatttccatcttcgagtatccatgtcttcttctccttatttgaaaatagtaatgctaatatgtgctaaagcgtaattcttagagagggcgacagaatgagaatgcgggtgtgctgtgaagtaactaaggcagaatcattcccagtaaatgtttgcgcctatctatttctactccatgataaacctccaagagaatcattcgctttgtgtcgctggagtgatgtactttggatgctcagctgtgattcctccatcaggcaataaatttccttgtggagagccttccgccaatgctgccgactccaggcagttatagagtatttactacaatggatggcatgaacacatgaaaggatgtggggatgcaatcagagttctaacaagccagtgtcgaattcaagacactcaaactgcttaaaagtttatgtaggccataccaattaatcgtgtcagtttcaatggggagtgtaaccaatgtcttttaagactgtagtcaatggatcagtcatacagttgatctaaaacgacagtcatgcatcatacagcatttcagttttcttcagaagttacagcctcagaaacaggatctagaggaaaaaagggaaattactccaacgcgttttcatttcctgctttgggcactggcttgactacttaagctgtgctccatgaacctcgcaaagggctgtttcagggtttgggttagtgagcctcatcctggcagttattttatagtaaagaacattcaagtgctctgcctacctagggccctgtgaagcaatggaatatcatcctgatttagaaaatttggatgaagatggatatactcaattacacttcgactctcaaagcaataccaggatagctgttgtttcagagaaaggtatatatatgttttttctaatgtgtgcctttagctctcccgtttgaaaagatataaggggaggctaggcatggtggctcacacctgtaatcccagcactttgggaggccgaggcgggtggattgactgaggtcaggagttcgaggccagcttggctaacgtggtgaaactctgtctctactaaaaatacaaaaattagccgggcatggtggtgcaatattattaccccagtttcacaaagaggaataaaaaacaacaaagggagtaatttgcccagggtcatgcaacaaacatatgaaaagggaaaattacccttagtaatcagtgctatctccccaacattaagctatttcctctaagaatcagtgggatttcagggatcctactaatgtcaagacctgtagatgtcaatgtggaactgaaattaggagcatacagttatcaagccaatgtgccgaaattacaattccagcaattgaagaagaaggtatccttactggtggagaagcacagcaaatcctaggtgaccaggtaacctaggcagtgattaataattcacttaaaaatttgccagtattttttgttgttgttgttggtggtgtgtgtgtgtgtgtgtgtgtgtgtgtgtgtgtgtgtgttttaacagggtatcacttttttgcctatgctgctctggaattcctaggctcaagtgatcctcctgccacagcctccagagtagctgggactacgggagctcaccacaatgcccagctaattaaattttttttctttctttgtttttcttttttttttttggtagggacagggtctccctgtgttgcccaggctggtcttgagcttctggcctcaagcaatcctcctacctcagtctcccttctgggattacaggtgtgagccaccgtgcaaggccagatttttgatgaactgtagaattaaactgccccaccatccgtcattctctttctttattccatttctgccccctctggctcctcaggatcgtgtgctgcatctcctccttggcgcctcattgctgtaattttgggaatcctatgcttggtaatactggtgatagctgtggtcctgggtaccatggctatttggagatccaattcaggaagcaacacattggagaatggctactttctatcaagaaataaagagaaccacagtcaacccacacaatcatctttagaagacagtgtgactcctaccaaagctgtcaaaaccacaggggttctttccagcccttgtcctcctaattggattatatatgagaagagctgttatctattcagcatgtcactaaattcctgggatggaagtaaaagacaatgctggcaactgggctctaatctcctaaagatagacagctcaaatgaattgggatttatagtaaaacaagtgtcttcccaacctgataattcattttggataggcctttctcggccccagactgaggtaccatggctctgggaggatggatcaacattctcttctaacttatttcagatcagaaccacagctacccaagaaaacccatctccaaattgtgtatggattcacgtgtcagtcatttatgaccaactgtgtagtgtgccctcatatagtatttgtgagaagaagttttcaatgtaaatgtatgtgagaatataaagatggtgtgtgtgtgtgtgtgtgtgtgtgtgtacatgcacacacaccaccaccaccaccactaccaacaacagaacagaacagaacagaacagaacagattaatattaaaaaacagaaaaaatgctgggatgctaagagactttaacctcatttgagaacttggatgaagaagctgagacttttgtacttgtcatcttcacaaagatggtggcactatcttccagttaggaagtcactagacatggagtgagggcagctcaacaatacagagaatatgtgaacctgaggtaccctgactcaaatttcacaaccacaatgaaacccctacactatcaggaaacactgtagaggagtgagactgaagactttaaaagccagagaatcagcctacttactgtggtgttttctagacaggacagggaaagtatatctaggaaataaaaacaatacaattcagcaaacaaaatctgcataatgacaacctcagttggtatggtatgttatggtatggtatgggtgtagaagtttcacaaggccctatgaagaactacagacagttaaatagggggaaagctttttctaggatcaagcctactgaaccccaagaagtcagcactgaacatatgtacagatcagtatcattaaatgaactagtaagacatatacatatatgttaatcaaatattggtaccagagtacacactgtgtttgcatgattttctcagtatctacagtacaccagacacagggagaaggcaaaatgaacttctaaattgag

SEQ ID NO: 259 - DNA, 2346 bp, synthetic construct
  source 1..2346: mol_type = other DNA
cccctcccctcccctcctccctccccctcccccaaatgtggtagtacataccattccagcacttgagagacaatgatgggtggatttctgtgagtttgaggacagccagggctacacaaagaaacagtctcaaaaaacaccaaccaccaccaccaaagatttagtttttaattctatgtgtgagggagtgtgcacttgactgcaatgcctgtagcatcatccacggagctggagttacaggtagtcatgagatgctcaagtgcatgctgggaatgaatgtgggtcctctcaagagcactgagcactcttaacctatgagccacctcttcaaccccttgttacttgagtaaataaatttgtgataaaaggataagaataatacatatgcgtacatgaagaacagtgagtgatacatgtatgtacatgaagaacggtgaggaaaatatattttccgagaattcaaaataagtgaataattgagtgcagatgtgtctaattttctggtccagtagatgcatctggtgagcttgtgctgttctccacccagtgtcttatgatgcctcttctcacaggctacatcctcacagttggattcatgagttttgcagtgtgctacaaatatgggcccctggaaaatgaacgaagcattaacctgctgacctggacgctgcagctgctgggcctgggactcatgtattccagtatccagatcccgcacgttgcctttgctctcatcgtcattgcactgtgcactaagaacctggaataccctatccactggctgtgcagcacctacaggggcggtagtggaggaggtggctctggaggtatggtgagcaagggcgaggagctgttcaccggggtggtgcccatcctggtcgagctggacggcgacgtaaacggccacaagttcagcgtgtccggcgagggcgagggcgatgccacctacggcaagctgaccctgaagttcatctgcaccaccggcaagctgcccgtgccctggcccaccctcgtgaccaccctgacctacggcgtgcagtgcttcagccgctaccccgaccacatgaagcagcacgacttcttcaagtccgccatgcccgaaggctacgtccaggagcgcaccatcttcttcaaggacgacggcaactacaagacccgcgccgaggtgaagttcgagggcgacaccctggtgaaccgcatcgagctgaagggcatcgacttcaaggaggacggcaacatcctggggcacaagctggagtacaactacaacagccacaacgtctatatcatggccgacaagcagaagaacggcatcaaggtgaacttcaagatccgccacaacatcgaggacggcagcgtgcagctcgccgaccactaccagcagaacacccccatcggcgacggccccgtgctgctgcccgacaaccactacctgagcacccagtccgccctgagcaaagaccccaacgagaagcgcgatcacatggtcctgctggagttcgtgaccgccgccgggatcactctcggcatggacgagctgtacaagtgacacgccaaatgaagtttctgttcacgaacaggagtatggattagggagcatctttacccaggatgaggagctgtcctcagaagaggagggctcagagtaccccactttcacacagaacaatttcttgacttaaatagcagtctgttgttttcatatagactggcatggtaccttggtgtggccacattgtaagtgctgtgtgattctcccaggcttttataagagcctggagcgggtgcaggagttctgctggaatgaggggctgagtgggttaccctctggcagtacttttggtgtgtacctcaggctggtcctcttcgaggaaagagtggcggaggcactgagggctgcggcagctcgcttctgacatttgagcacttggcccactttgcggttcctgaagtcattgtttgcccacaacagtctagctcctgtttaaaagtttgctgagttctggcaactctgtcactgtgacagacccttaaaaatgagtattaagtgcagtaatgcattcaaatggaggctgcatcttttaaagagaatctataagtctgagccattttttacttctgtctgctctatttcactggatccttataataatcctgaatgatttaaatattgaagaaaaaatagattgttacctatcttgttttttaaacaaatatatttttttaagtgcaagaaagtcatgttctttacccaataagtgctccagagtacaaaccctactgaccccagatatttattacctgtgaaacccctggagctgctgctgttgagccttgaatgctcac

SEQ ID NO: 260 - DNA, 4590 bp, synthetic construct
  source 1..4590: mol_type = other DNA
gaccagagggaagatgtcttaaatagagccagagggatttcaagaacaagacacgtcttagccagcaggatacttgacttgcaagcatgaggatctgtgattggatacacaggaagcatgagaaaagccagttacagtgtcacatgcctgtctcccaagaacagagacacgagaggcagagacagtcagatccctaggagcacacaggccggcttggtccacggtgtgaatttctgcactgtgttagttattgtttggttgctgtgagaaaacatcttaacaaaagcaactcagcaaaggaagggtccattttggcttgtagcgtcggggatacactccatcctggaggggacacatggtggccagaggcagctgtacattgcatgctcagtcaggaagctaagagatacacgcagcctctgggttctctttgtccttttgatatagctagggattttggcccacggaatgttactgcccataggtcagggtggatcttcttacaccaaagaactgagtccagatagtctctcattcatgttcctataggctaacctgacctagaaaatccctcacgggcaagctcataggtttgcccctagatgattctagagcccgtcagggagtcagtcattaaccatcttgcacacgcatgagatattctgtttcaaacaaaaagtggaaggtacccaaggaccagaacttatcctaatgaccatgcacacgctatgctccctgcactcctggaactgcttccaagcaagtggctgtctcctctgcagccctgtcccaagcccacaacaccacagtgttccagggcgtggcgggccagtccctgcaggtgtcttgcccctatgactccatgaagcactgggggaggcgcaaggcctggtgccgccagctgggagagaagggcccatgccagcgtgtggtcagcacgcacaacttgtggctgctgtccttcctgaggaggtggaatgggagcacagccatcacagacgataccctgggtggcactctcaccattacgctgcggaatctacaaccccatgatgcgggtctctaccagtgccagagcctccatggcagtgaggctgacaccctcaggaaggtcctggtggaggtgctggcaggtgagtgggcagtggctgcctctctggcctgcccctgttccaggcctcatgttttgggcgtctgtgtgcagaaccacccactgggctctcagggatcctgggaaaacccatcgtatggtctcatctccctactcagggctaccaaggatagttgtgcaggttgctcactatacaagggggccaaaatccagcccggactccttttgccagactgtgttccctggtgcagagctgcatcacctgcaagaagggcacctttctctactttgcattaaggcactctgtgaactagcctggccttggccctccttgcccaaacagctttatccatctccatccagttagcatgtgaacatgataggaggtccttaaggaggaggagattaatttattccctcaccaaccaaccaatggccctatcaacgtaagtgaagcaccaacctggtgcagaaaatcacccctagaaaggaacactgcttgtgctgggcaatgtgcttcacttctctgggcctccattctctcatctgtaaatggagagggtggtgtctgtcctgctgaccccatagggttcctgtgagtttttatttggcggggggcgttgggggcagggtgtgacatgtgctccaagcctcctgctactgaactgtcttgggatcgtcattccaggtgtgagtaggtgggccagggtgtctcctttccacccccgagctctgcgcagggaccaccctccaggaaggccttctgcttgagtctgcagaacacaactgtgtccccaaaggagaacaaatctggggctacaaaggccttttctgactctcctcctttccaaccccttctcccagtatggctctttaccatggaaatgaggtcaggagtagtatttgcctgacttggggaggccaggggagactgccagtcatagacacaaaccccacctccaccactttcctaaggatggccggtggcagtgaactcccttagccacctcccaagagggagacagaaaaataaaagtagcccatagcttgtgtagacagcttgacagtttagataggattttcaagtacatccacgattgtatttgctcttcttagcccctgtgcggaaggaggggggcattgcagttactgagctccgatgaggtgctggatacggcacagaggtgccctcacggaatcctggcaaccctgctattaaggaagtgttcctaacggcccactttataagtggggaaactgaggcttatggagtgtaatgacctgatccacataggaccagtgcccaggggacctcaccccacccataaaggttctcccgccaaggttctccccctgcctcgaggaggaaggggctggaggctcatggctctgcctcccatagaccccctggatcaccgggatgctggagatctctggttccccggggagtctgagagcttcgaggatgcccatgtggagcacagcatctccaggtacagcgatgggtctttcctaaaacccgtgggcagacttccaccctgcagagccccacgggggtgggggctgggcatcctgaactacaaattacaaggcaactagagcctgaagggccctggatatctcttatgtaaacacccctccaccagctgctacatgttagttagttagcgtgactgtgtcagttgttcatttattggaagacttccataatgctttgtaaagagcagttgctctacgactcctgaatatcagctcccgcccctcccctggcagcccccagacatccccataattcagcaacaatgaatgttttagtactttagtacaaagctaagacccccagatctctgcttcattggtaggaccagaatcagttctgactggtccatgcctgtgtactggtgtttaaacgttgttcatataaccacatgtgtgtacacacacacacccatggcatagcactgtatacagaagaaaactgctcagtgagggaaggtggtgtgtttaagtgcactcagcaggttagtggcagagcatgcctagaactcaagtctcttgactatgggctcccaaagctccaaaaaggcccatcccagggatggtgctgggtgggatttgctgaggtcctagaagctcctggtttctccccattccctgagagaagattctaatctgtaggccatctcaaggctcccatctgccttcttgtctctccaaggagcctcttggaaggagaaatccccttcccacccacttccatccttctcctcctggcctgcatctttctcatcaagattctagcagccagcgccctctgggctgcagcctggcatggacagaagccagggacacatccacccagtgaactggactgtggccatgacccagggtatcagctccaaactctgccaggtgggcttggagagcacagccatcaagggtggactgggcagggatgggaggcggtgccgagaggggccacatgagtccttggactattgcagggctgagagacacgtgaaggaagatgatgggaggaaaagcccaggagaagtcccaccagggaccagcccagcctgcatacttgccacttggccaccaggactccttgttctgctctggcaagagactactctgcctgaacactgcttctcctggaccctggaagcagggactggttgagtgggaggagaactacagcttaagtccagccaggagtcaatccagcctgcatgctctcccctcctccaccaagacttctgtttctgctacttttgcttcagaggccgcctctgcctcaagcccacctatcctgggagcaggaatactggtgtgtacatctgtgttgagtggggaagacagctggatggttgtctgtcaacttctgcactttggacattaaacattctccacacaccaacccaggactgcctactctttctagatggttctgtgtgggtctatgttctgccccactgctgaggtgttgggtacagctgctggggaggtgaaacccagggagtgcttgcctatgtctccccgttctactgccattggctgttgggctttagggaagtgctgagacaccactcagggagtgggagaatgcagtctgagatgtggcaggtcaaagttggggttctctggctcctggtaatccagtcgccactggagtgccacagaggagttaggaatgaaggaatgggggtccatgggcccttgatgaggctgggaccattgggggcccgcaggctgaggacaatgataaacctggggctgggggaacagggatttctggcttagatgtcagtgaaactccttagcttagcagcagttgtttggaagcacatggaggccttctgtggaagatttaggcagtgtctttgtagtcaaaggctttctccgtgctcccaacggtgcttctcaatgaaagagacagtccatgtttatccatactgtttattgactgttcattgtgg

SEQ ID NO: 261 - DNA, 3192 bp, synthetic construct
  source 1..3192: mol_type = other DNA
ccgtgtcaacagggatggaggacaagatgtcttcctgaggaatgcaccacacactcgtatttccagggctagggtaagacaaagagacttttctgggtcctggcaacattagcgctatcaaggaggactccaaaaatgcatagaatgaggaaggaggagaaagttggctgatattctcaggttctcatcaggagactgagctgtgtagcacaactaccagatagtaaccagctaggtcaaggcacaaaggctgcgtacaaatagaatgtgtaggatagggggttgttggggatccttaggaagcagggagtaaggtccaaagagaactaaagtcatattagaacctaaaatagagatttagggaaaagagcttgcataagggtagaaggtatttctgaagaccttcatcaatgaatgatcaggtttcatggggctggagagactgctcagtggttaaaaacaatagctgctcttccagaggatccatattcagttgccaacaaccaaatggcatcttacagctatctgtaagaaacgccagttacagggtattcagtgctcccttcaaccagaacagccatctggaacacacattatacacaaattcatacatagaaaataaaatacatggaaaaattaaggtcaggttacagcatcaagtgaaagaaactgataaccctgcctgtctcaaagcaactgaaaaagacaccgtctttaaagccaagctaagaccagagcctctccaaatttatgaggccacagatatcagaaaccctcacacatcctcctttcttgcagcctccaccaagggcccatcggtcttccccctggcaccctcctccaagagcacctctgggggcacagcagccctgggctgcctggtcaaggactacttccccgaaccggtgacggtgtcgtggaactcaggcgccctgaccagcggcgtgcacaccttcccggctgtcctacagtcctcaggactctactccctcagcagcgtggtgaccgtgccctccagcagcttgggcacccagacctacatctgcaacgtgaatcacaagcccagcaacaccaaggtggacaagaaagttggtgagaggccagcacagggagggagggtgtctgctggaagccaggctcagcgctcctgcctggacgcatcccggctatgcagccccagtccagggcagcaaggcaggccccgtctgcctcttcacccggaggcctctgcccgccccactcatgctcagggagagggtcttctggctttttccccaggctctgggcaggcacaggctaggtgcccctaacccaggccctgcacacaaaggggcaggtgctgggctcagacctgccaagagccatatccgggaggaccctgcccctgacctaagcccaccccaaaggccaaactctccactccctcagctcggacaccttctctcctcccagattccagtaactcccaatcttctctctgcagagcccaaatcttgtgacaaaactcacacatgcccaccgtgcccaggtaagccagcccaggcctcgccctccagctcaaggcgggacaggtgccctagagtagcctgcatccagggacaggccccagccgggtgctgacacgtccacctccatctcttcctcagcacctgaactcctggggggaccgtcagtcttcctcttccccccaaaacccaaggacaccctcatgatctcccggacccctgaggtcacatgcgtggtggtggacgtgagccacgaagaccctgaggtcaagttcaactggtacgtggacggcgtggaggtgcataatgccaagacaaagccgcgggaggagcagtacaacagcacgtaccgtgtggtcagcgtcctcaccgtcctgcaccaggactggctgaatggcaaggagtacaagtgcaaggtctccaacaaagccctcccagcccccatcgagaaaaccatctccaaagccaaaggtgggacccgtggggtgcgagggccacatggacagaggccggctcggcccaccctctgccctgagagtgaccgctgtaccaacctctgtccctacagggcagccccgagaaccacaggtgtacaccctgcccccatcccgggatgagctgaccaagaaccaggtcagcctgacctgcctggtcaaaggcttctatcccagcgacatcgccgtggagtgggagagcaatgggcagccggagaacaactacaagaccacgcctcccgtgctggactccgacggctccttcttcctctacagcaagctcaccgtggacaagagcaggtggcagcaggggaacgtcttctcatgctccgtgatgcatgaggctctgcacaaccactacacacagaagagcctctccctgtctccgggtaaatgagctcagcacacacaatgctcctgggtcctaatggacactggcacccatatccatgcatcccttgtataaataaagcacccagcaaagcctgggaccatgtaaaactgtcctggttctttccaaggtatagagcatagctcacgggctgatagttctagccagggttggaggacagccttgtctttaggtttctgcactgcaggactcagagctcatgagtcatcttggcctgaagagtggaacttagctttaggcagtatctttcctttacttcccacaaaccagcagctgccagacatagagataatcctaggaagcctcaaatggagaagcacacaaacccacctccctcaggctgttcctctccccaggccccacttctttacctaagggtttctctgagtctattgtagaggcacacatggccagggatattccggagacccttagcatccatacactcaactcaggcagcttttcacaggtgaggtctgcacatccatacagacggctcactcctgcctgtgccacgtggggctgaggcacatggctcttgctgccccaagggagggactattagatagccacagtcatgctgaatcctgacccattcaaattagcctgctgaacaccatccagtccatatagcacatgtatccacatgcacgtgtgcacacacacatttaacacactgggacaactcctctgtgccctgcacagcacctacatccagcaatgtatcaccatacacacggccaaaaattcaatgcccacgtttctgccatcacaaacagac

SEQ ID NO: 262 - DNA, 3113 bp, synthetic construct
  source 1..3113: mol_type = other DNA
gattcaaaccaaaatgggaggactaaggggggagggcacagctcctggcatcctgatatctactactctctgtttttcttttctgctggtctcaacgataatttgattccaggcccacaagtgtcaaaatgaaattcacagttttgaggttttcctctatttcagtggctaatttaaaactttatacctacctgatttttaaatagtaaacctcagaactcatagattcccaaagggacgagaagcatatacatggacataggacagagagaacagagacataaaatagacagagagacaaattcatattacagacagagaggctaagacaaagcgaagcattcatagacagaggacagacacttacatgagattctattctgaataaaaggctatggctaggtactctgagtcacaaacaaaaacaaaacaaaacaaaacaaaaccccaccaaaccctagccctagccctaaccctagccctagccctaaccctagccctagccctaaccctaaccctaaccctaaccctaaccctaaccctaaccctaaccctaactgttaaaaacacttgaaaataacgatggctttaggaaactatcttcagcttgtcgctaagtatctgcccattttccttttccagggtgactctggtggccctttgatctgcaaaggcatcttccatgccctagtctctcagggctataaatgtggcatcgccaaaaagcctggaatctatacgctattaactaagaaataccagacctggatcaaaagcaagcttgccccatcacgtgcacatggaagcggagctactaacttcagcctgctgaagcaggctggagacgtggaggagaaccctggacctatggtgagcaagggcgaggagctgttcaccggggtggtgcccatcctggtcgagctggacggcgacgtaaacggccacaagttcagcgtgtccggcgagggcgagggcgatgccacctacggcaagctgaccctgaagttcatctgcaccaccggcaagctgcccgtgccctggcccaccctcgtgaccaccctgacctacggcgtgcagtgcttcagccgctaccccgaccacatgaagcagcacgacttcttcaagtccgccatgcccgaaggctacgtccaggagcgcaccatcttcttcaaggacgacggcaactacaagacccgcgccgaggtgaagttcgagggcgacaccctggtgaaccgcatcgagctgaagggcatcgacttcaaggaggacggcaacatcctggggcacaagctggagtacaactacaacagccacaacgtctatatcatggccgacaagcagaagaacggcatcaaggtgaacttcaagatccgccacaacatcgaggacggcagcgtgcagctcgccgaccactaccagcagaacacccccatcggcgacggccccgtgctgctgcccgacaaccactacctgagcacccagtccgccctgagcaaagaccccaacgagaagcgcgatcacatggtcctgctggagttcgtgaccgccgccgggatcactctcggcatggacgagctgtacaagggttccggagagggcagaggaagtcttctaacatgcggtgacgtggaggagaatcccggccctatgaagctgctgccgtcggtggtgctgaagctccttctggctgcagttctttcggcactggtgactggcgagagcctggagcagcttcggagagggctagctgctggaaccagcaacccggacccttccactggatctacggaccagctgctacgcctaggaggcggccgggaccggaaagtccgtgacttgcaagaggcagatctggaccttttgagagtcactttatcctccaagccacaagcactggccacaccaagcaaggaggagcacgggaaaagaaagaagaaaggcaagggactagggaagaagagggacccatgtcttcggaaatacaaggacttctgcatccacggagaatgcaaatatgtgaaggagctccgggctccctcctgcatctgccacccaggttaccatggagagaggtgtcatgggctgagcctcccagtggaaaatcgcttatatacctatgaccatacaactatcctggctgtggtggccgtggtgctgtcctctgtctgtctgctggtcatcgtggggcttctcatgtttaggtaccataggagaggtggttatgatgtggaaaacgaagagaaagtgaagttgggcatgactaattcccactgaataacttcgtataatgtatgctatacgaagttatgattgcacattgagattttcctggatctgccagtcacttgcttctttttccaggatgcgcttgcagacctggcgtcctcttcagaggcagctggctatagggagggcatggaacagctgggatggatttctgtttctcagaaattcatttagttagggagccatgctcttttttcacgtgtattaatgatttgtttttactgtgttcgttcatcctaaataaaatgtggacgtctgtgtttgtctgcatggatgtcaagaaacatctcccttgcctccatccatactcctcaaggggcaatgaggtatccacacaaggcaataatggtacctcatccaaccttgtttgtgttaggatttctgccaagtcatctcaagttattagggtgttttaagttatggtaagagttttcaaggtgcttttaatgtgttaagtgctttaaaaaagacttagttatccaataaagtatcatcaactataggtactcatatacaatggatcttcaggatttattcatcttggaaattgaaattttatactcccatgaacttgtgtgatttttttagatgttaataaaagagaataaagtaagataataaagataaaaattttaatatactctgccatatttcccatacttctaccgactgtattactgtctaaaaccataagattatttgtaatatagattgtattgaccttttgcccccaaattgtgtttgaatagacataaattgagtctgaaagtcagacgtaaaggtaaatcagctagccaggcacgatgacgcatgcctagaatcccagc

SEQ ID NO: 263 - DNA, 1996 bp, synthetic construct
  source 1..1996: mol_type = other DNA
gcccctccactgagcggaggggaagatatgtacatatatgacttgtctgcagaaggaattcagaacaaatccaggctctgtgaagtggagcatgctggtgtgcaatggaaagtctgtggcgattcgtgaggtggagtttcactctcacagcacagacagtgagagacaagagctggcgctcgaggcgtgtgcgcatgggttatgtcattatagcgtcaggaatctgagagtctgggtgttcaggaaatatgaccataaatcagtcagccctgcagatggttctatcacccacacttcctaccttagatagcgttcaggaagtggggttccacaatggctgcaggtgagagaagtcagtgtgacacggcagagatggtggaaacacaggctcagcgttgcaatgaccaaggggagctttagctgcagtcatagttcaaaaggaaatgagctgtggacatttgcagttctgtaagaaaaactgatatgctaaagtccagctcccgtgagacctttttaatttctaaacgtggtaaagaaacacaagcgacccatgcttctttgtagctttctgtttgagtaaatggaagtctggtcattctctattaattcgaagtatgtcaaaattcagcatcattccacgaattagagttcatatctctaccctgtgatttttaactgaatgtctttgaaatcagggctatcgtttactggctgattctttgtttcagaggaccttataatgtccttcaccgtatccatggcaatcgggctggtacttggaggatttatttgggctgtgttcatttgtctgtctcgaagaagaagagccagtgctcccatctcacagtggagttcaagcaggagatctaggtcttcttacacccacggcctcaacagaactggattttaccgccacagtggctgtgaacgtcgaagcaacctcagcctggccagtctcaccttccagcgacaagcttccctggaacaagcaaattcctttccaagaaaatcaagtttcagagcttctactttccatccctttctgcaatgtccaccacttcctgtggaaactgagagtcagctggtgactctcccttcttccaatatctctcccaccatcagcacttcccacagtctgagccgtcctgactactggtccagtaacagtcttcgagtgggcctttccacaccgcccccacctgcctatgaatccatcataaaggcatttcccgattcctgagtctgagatttcgttgtttttaatactttaaaaaaaaaagtctcttttagaaagaaaatgatatatagggtaagcggaatttgggagccacggccccagtaagtaattttccaagttgataggctcgtgaaagctgaacattaccgataaggcacaggttccttttgaacatgtttttctcacttaggtctcacaaaagtatgatttttctcaaaagtcctgtatttatgtattttttggattcagtgtgaggcattgaattaaagataccgattaaagattctaccctacaaatcatgtgtatttgtatattttaggttaaaaagactttatatgtttcattcactttcccatgaaactgctgacagacagaagtcactaaaataaggaattttaatgttactttttgagtaacgactgagttaccagcattcttgattcttagcgctttcgtggtgcgtgtttatgagatattagaacagcggaggctctaaaagcccaggattctactcagttatgaatgaaaatcaaacgaagatccaagctgtactgatgtcagagggatggttccattttgacagtgactttggttttttcctccgtatagattcatcgtgtagttcttcccaataacaattacccatatcattgatgtaaaacccttggacttagggggcatgaggatttaatatgcctgcggggtaacgatgttaccacagcaatggcagcttcaacttacttgttctaagcacaggg

SEQ ID NO: 264 - DNA, 2139 bp, synthetic construct
  source 1..2139: mol_type = other DNA
gttctgatttgttcacatctgagtcacacctggaaccagcaaacatgccggcacagttgacttactatgcgctctagtgagaagcctctggcagattccatgagtggaggacttgattttcatccctccttttcaccatagtttcttccctggtcagaattgaaagcacaaacccagattagggcaataaaatgcagattatctgtgaacattgtatttatttgcttttttaaaagtatttccccacatctgtgtttactgccacctctaagatagtatagatttaccaggcactggtgtggacagtctaagctgccaaataaggcttcagtgtgttcaactgaacaggttttttgtcatcccagccattcaggaggctgaggcagaaggatcacaaatttaaggactgcctgaacaacttagtgagatcttatttcaaaacatttaaaaagagctgggaatgtatcctgtacatttctctcacctcagaatttttttattgggaagaacttcaaaaactgaattgttcccacctttcctgatactagaacaaagtaatgttttctgttttgctgtattctgctatttctaggaaactcagtcaaatctgaaacaactttgtagtagtcatactccttatagttcctctccctcttcctattgtattggatgcttactgtgtggggcttggtggtaattgagcaggcatagtggagagtgcagctgcccacccgagccacatagcacttgtagagattgtcttaatccacttactgttgctggtgtagggagtcgctactggccagcttagcttgctgtgctggtgggagggatgatcagtgctaagggccgcctgtaatgaggtccttcctgtggtgtctttccagagtgaagggaaggacatccaagttgcagtcatccaaggacagttaacacttacactgtcatcgcagtaagccaggccgaaagacagtgtagaaaaggacacgggaacagtgtaatgtgctaaagctgaaaggagctgtgttgttagggtttttaactaaaccttaaatatggcttttcataagactgcaagggcagtgcattttgatgaagagactaaaggtctgtcggggatattgcaatgtttacttacaatcctttttccttccacttagggactgggcctgtatgctgctagagacattgaaaaacacactatggtcatcgaggccattggaacaattattcgaaatgaggttgcaaaccggaaggagaagctttatgagtctcaggtactgtataaactgagcacaggcagccagtgggacacaccgcaaatgcatcagctgtgtgtgctagggtgcccaggaatgtgaccagggtgctcccagcacagactgaacgtgaggggaagtcattcagaccacaccgatgactgactacctgccttctctttagaaccggggtgtgtacatgttccgcatggacaatgaccacgtgattgacgccacactcacaggagggcctgcaaggtgaggcaggaaggagactgtggcccagagggctttgctcggggaggggcagcggagctttatacttgctttgttaacgcatccagagaagcagccatagtttcctctgtacaggggaagctcttcattgttttcacactgagttttctgatgtgtcccacagatacatcaaccactcctgtgcccctaactgtgtggctgaagtcgtgacctttgagagaggacacaagattatcatcagctccaaccggaggatacagaaaggagaagaggtaagtaggggaagggcttgctgagatctgtaccagggtgtggcagttcctgactgcggcttccatcacatcactcttagagtctcagcctcaacccagggctttgccgtctgtttatcttacttcagacattcaaatgccggcttcttccttgtagtagatcataaagccacatgaaacccaccatatagtaccaagtagcttagcatcctcctttctttgtcccttaatctggacagtctgataagctcctttcaagatggttcctgtcaaagttctggcaatcacagggacttgatatattcacatgatatattattgcaaggactgtaggcacaaatttggggagc

SEQ ID NO: 265 - DNA, 3110 bp, synthetic construct
  source 1..3110: mol_type = other DNA
cagaaggttaaaggtgtctaagaccatgtccaaagcccagtaggaggattagggagatggctgggctggagagatggctcagtggttaagagcactggctgtgtttgcaggggaccagagttcaattcccagcaaccacataatggctcacaatcatctacaatgggatctgacaccctcctttgacatgcaggcatgcatgtacacagagcagtcatacataaattatataaataaatacattaaaaaataaaaagtaataaagggtaattacctagtttgactgttgcagcgaggggggaggggaagaggaaagggaagagggtgggcagggaaggattttaaagtgagcatgtctcaggtatccagaaaaggaagcacgactatgctttctggtttaacctatataatgataagatttaaaacatcatgatgatcaaagtaggcctggggatgcagctcggtgctgaagcgctcagctaccttgcctatggctgtaggtccagccatcagcagctgcaacaataataatcagagctgaaggaagactatggtgacagagaagccttgccctgactttcttctccaactcacagccttatcagcctaatcgccgcactcgcggtggactacgtaatcggcatggagaatgccatgccctggaatttgcctgccgacctggcatggttcaaaaggaacacgctgaataagcctgtcattatgggaaggcatacgtgggagtctataggcaggcctctgccaggtcgcaagaacataattctgtccagccagcctagtacagacgaccgtgttacatgggtgaaaagtgtagacgaggccattgccgcctgcggagatgttcctgaaattatggtcattggcggaggcagggtaattgagcagtttctccctaaggcccagaagctctaccttacccacatcgacgcggaggtggaaggcgacacccattttcccgattacgagcccgacgattgggaaagtgtcttctctgaattccacgacgccgatgcccaaaactcccactcctattgttttgagatccttgaaagaagaggggctcccaaaaaaaagagaaaagtctacccctacgatgtccccgattacgccggtagctcagagctcatcatctctggcagttccgggggctttctgaggaatattggaaaagagtaccaggaggcagccgaaaatttcatgaggttcatgaacgatcaaggtgcatatgcccccaacaccctgagggatctgcgtctcgtctttcactcttgggcaaggtggtgtcatgctcgtcaactggcgtggtttcctatcagccccgaaatggcgcgggaatacttcctgcagcttcacgacgctgacctggcaagcactacgattgataagcattacgcaatgctgaatatgctgctctcacattgtgggttgcctccactgagcgacgacaagtctgtctcattggctatgaggcgaatcaggcgggaagcagctaccgagaagggtgaaaggactggacaggctatccccctgagatgggacgacctgaagctgctggatgtactgctcagcagaagcgaacggctggtggatctcaggaaccgagcgtttctttttgtggcatataacaccctgatgcgtatgtctgagatctcacggattcgggttggggacctagaccagacaggcgataccgtgaccctacacatctcacacacaaaaactatcactactgcggctgggctggacaaagtgctttccagacgtacgaccgccgtgctgaacgattggcttgacgtaagtggccttcgggagcatccagacgccgtgctgtttccccccatccatagatctaacaaggctcgaattacaactactcctctgaccgcgcccgctatggagaagatcttctccgatgcttgggtcctcctgaacaagagagacgctacccctaataagggaaggtacagaacttggacgggtcattctgccagagtaggtgccgcaatcgacatggccgagaagcaggtgtccatggtggagattatgcaggaggggacctggaaaaaacctgaaacccttatgaggtacctgcgaagaggtggggtgagtgtgggcgctaacagtaggctgatggacagttagtgaaacttgtttattgcagcttataatggttacaaataaagcaatagcatcacaaatttcacaaataaagcatttttttcactgcattctagttgtggtttgtccaaactcatcaatgtatcttagcagctgttgacactaaagctatgtctgcccctggtgccaaatgttgaggggaccaaggcaggccgattgctgagtttgagacagcctggtctacagagagagttttaggactacacagagaaaccctgtctggaaaaacaaacaaacaagcaaacaaagagtgaaataatggtgcatgcctgtatttccacagtgctagggctgaaatgaaggatctgccttgccagacaagccccgcccctgagccctcccctaaccgcctctggcccctcagcccctcagccctttaatccctcagctctgggttctttctcaagcactttcttgagtgagaaaaacaaattatatcttcagaatttttgaaaatcaatgaggaaaaaaataggtaaaatgacatcaactcaactttatttcccaaacaattttgttcccaaaagaccagagaggccaatgaccgaccacctttaacccaatgagtttccttcagggaccagagagaagtctctgttgtttgggtaattagataatccttcggctgcctgaaagaactgcgtttctaagagagttcaccaaattgcagattggcttccatgggcttctccttctctacttggagtcatgacacactgtatttatagacagcttgatcaagtggtactttctcttcgcacacaacaccagcttgatttactgctaaggaaatagtgcaaaaaaagatgagtaaaagaaaaactatcttcagtcttcgacaaacgattttcgcaataggagatgggcctattacgattgcagttattacagtcactggcatcacatagcatgta

SEQ ID NO: 266 - DNA, 4087 bp, synthetic construct
  source 1..4087: mol_type = other DNA
ggctcaaacttacagcaacctccctcccccagccttccccccactcccccccgccacccccccaccccccacccccgcactcccaagtgctgaggttacaggcacaagcaacctaacctggcccttgccatgttttataacttgcttttggaagacttctggttctgtgatgctactgggttagcggggagacaggagggcagaaggttaaaggtgtctaagaccatgtccaaagcccagtaggaggattagggagatggctgggctggagagatggctcagtggttaagagcactggctgtgtttgcaggggaccagagttcaattcccagcaaccacataatggctcacaatcatctacaatgggatctgacaccctcctttgacatgcaggcatgcatgtacacagagcagtcatacataaattatataaataaatacattaaaaaataaaaagtaataaagggtaattacctagtttgactgttgcagcgaggggggaggggaagaggaaagggaagagggtgggcagggaaggattttaaagtgagcatgtctcaggtatccagaaaaggaagcacgactatgctttctggtttaacctatataatgataagatttaaaacatcatgatgatcaaagtaggcctggggatgcagctcggtgctgaagcgctcagctaccttgcctatggctgtaggtccagccatcagcagctgcaacaataataatcagagctgaaggaagactatggtgacagagaagccttgccctgactttcttctccaactcacagccttatcagcctaatcgccgcactcgcggtggactacgtaatcggcatggagaatgccatgccctggaatttgcctgccgacctggcatggttcaaaaggaacacgctgaataagcctgtcattatgggaaggcatacgtgggagtctataggcaggcctctgccaggtcgcaagaacataattctgtccagccagcctagtacagacgaccgtgttacatgggtgaaaagtgtagacgaggccattgccgcctgcggagatgttcctgaaattatggtcattggcggaggcagggtaattgagcagtttctccctaaggcccagaagctctaccttacccacatcgacgcggaggtggaaggcgacacccattttcccgattacgagcccgacgattgggaaagtgtcttctctgaattccacgacgccgatgcccaaaactcccactcctattgttttgagatccttgaaagaagaggggctcccaaaaaaaagagaaaagtctacccctacgatgtccccgattacgccggtagctcagagctcatcatctctggcagttccgggggctttctgaggaatattggaaaagagtaccaggaggcagccgaaaatttcatgaggttcatgaacgatcaaggtgcatatgcccccaacaccctgagggatctgcgtctcgtctttcactcttgggcaaggtggtgtcatgctcgtcaactggcgtggtttcctatcagccccgaaatggcgcgggaatacttcctgcagcttcacgacgctgacctggcaagcactacgattgataagcattacgcaatgctgaatatgctgctctcacattgtgggttgcctccactgagcgacgacaagtctgtctcattggctatgaggcgaatcaggcgggaagcagctaccgagaagggtgaaaggactggacaggctatccccctgagatgggacgacctgaagctgctggatgtactgctcagcagaagcgaacggctggtggatctcaggaaccgagcgtttctttttgtggcatataacaccctgatgcgtatgtctgagatctcacggattcgggttggggacctagaccagacaggcgataccgtgaccctacacatctcacacacaaaaactatcactactgcggctgggctggacaaagtgctttccagacgtacgaccgccgtgctgaacgattggcttgacgtaagtggccttcgggagcatccagacgccgtgctgtttccccccatccatagatctaacaaggctcgaattacaactactcctctgaccgcgcccgctatggagaagatcttctccgatgcttgggtcctcctgaacaagagagacgctacccctaataagggaaggtacagaacttggacgggtcattctgccagagtaggtgccgcaatcgacatggccgagaagcaggtgtccatggtggagattatgcaggaggggacctggaaaaaacctgaaacccttatgaggtacctgcgaagaggtggggtgagtgtgggcgctaacagtaggctgatggacagtggatccggcgccacgaacttctctctgttaaagcaagcaggagacgtggaagaaaaccccggtcctggagtgtctaagggcgaagagctgattaaggagaacatgcacatgaagctgtacatggagggcaccgtggacaaccatcacttcaagtgcacatccgagggcgaaggcaagccctacgagggcacccagaccatgagaatcaaggtggtcgagggcggccctctccccttcgccttcgacatcctggctactagcttcctctacggcagcaagaccttcatcaaccacacccagggcatccccgacttcttcaagcagtccttccctgagggcttcacatgggagagagtcaccacatacgaagacgggggcgtgctgaccgctacccaggacaccagcctccaggacggctgcctcatctacaacgtcaagatcagaggggtgaacttcacatccaacggccctgtgatgcagaagaaaacactcggctgggaggccttcaccgagacgctgtaccccgctgacggcggcctggaaggcagaaacgacatggccctgaagctcgtgggcgggagccatctgatcgcaaacgccaagaccacatatagatccaagaaacccgctaagaacctcaagatgcctggcgtctactatgtggactacagactggaaagaatcaaggaggccaacaacgagacctacgtcgagcagcacgaggtggcagtggccagatactgcgacctccctagcaaactggggcacaagcttaattagtgaaacttgtttattgcagcttataatggttacaaataaagcaatagcatcacaaatttcacaaataaagcatttttttcactgcattctagttgtggtttgtccaaactcatcaatgtatcttagcagctgttgacactaaagctatgtctgcccctggtgccaaatgttgaggggaccaaggcaggccgattgctgagtttgagacagcctggtctacagagagagttttaggactacacagagaaaccctgtctggaaaaacaaacaaacaagcaaacaaagagtgaaataatggtgcatgcctgtatttccacagtgctagggctgaaatgaaggatctgccttgccagacaagccccgcccctgagccctcccctaaccgcctctggcccctcagcccctcagccctttaatccctcagctctgggttctttctcaagcactttcttgagtgagaaaaacaaattatatcttcagaatttttgaaaatcaatgaggaaaaaaataggtaaaatgacatcaactcaactttatttcccaaacaattttgttcccaaaagaccagagaggccaatgaccgaccacctttaacccaatgagtttccttcagggaccagagagaagtctctgttgtttgggtaattagataatccttcggctgcctgaaagaactgcgtttctaagagagttcaccaaattgcagattggcttccatgggcttctccttctctacttggagtcatgacacactgtatttatagacagcttgatcaagtggtactttctcttcgcacacaacaccagcttgatttactgctaaggaaatagtgcaaaaaaagatgagtaaaagaaaaactatcttcagtcttcgacaaacgattttcgcaataggagatgggcctattacgattgcagttattacagtcactggcatcacatagcatgta

SEQ ID NO: 267 - DNA, 4062 bp, synthetic construct
  source 1..4062: mol_type = other DNA
tggtattggattttggtttgtttgttggtttgtttgtttctgaggcaggctggcctcagactcacggagggagacctgcctgcctgcctctgcattcccaccgctaagcttcagcacatcctgtgtagtccagactgtcttctccagcttgcttcattctatagccaagatgaccatgacctcaatcctgcttctacctcccaagtgatgggttacagatatgaagtaccatgtctctcgtgtgtgccctgctaaggtcggaaccctgggtttcatgcatgtcaggcaagctctctaccaagtgagttacagccctagcactctgttttttgtttctgagacagaatctcactatgtagacctcacatagtttagtacacctttgatcccaacacttaggaggcagcggcaggtagaactctgtgagttccaggcaatccggggccacatagtgagattctgtcttaaaaccaaataaaacatcaagagacaacaacgaaaacagcgactgttgcttggggcttactggctgcctaccctatcacttggtagtttggtcaccttgaaaaactgaggtgacttctctaagcattctgcctgtcacatgaagggtcagtgatgagtgtagcttccctggggtcactcactgagaacttggagctagaccctgtagctctgcagtcccattcagagtccctgcaaaagccataactgtgacctgctgtccctttttctgtccctctctcctctgcagtgctcagccccatggccccagccggccactgagccccaccatgggcatcagcctaatcgccgcactcgcggtggactacgtaatcggcatggagaatgccatgccctggaatttgcctgccgacctggcatggttcaaaaggaacacgctgaataagcctgtcattatgggaaggcatacgtgggagtctataggcaggcctctgccaggtcgcaagaacataattctgtccagccagcctagtacagacgaccgtgttacatgggtgaaaagtgtagacgaggccattgccgcctgcggagatgttcctgaaattatggtcattggcggaggcagggtaattgagcagtttctccctaaggcccagaagctctaccttacccacatcgacgcggaggtggaaggcgacacccattttcccgattacgagcccgacgattgggaaagtgtcttctctgaattccacgacgccgatgcccaaaactcccactcctattgttttgagatccttgaaagaagaggggctcccaaaaaaaagagaaaagtctacccctacgatgtccccgattacgccggtagctcagagctcatcatctctggcagttccgggggctttctgaggaatattggaaaagagtaccaggaggcagccgaaaatttcatgaggttcatgaacgatcaaggtgcatatgcccccaacaccctgagggatctgcgtctcgtctttcactcttgggcaaggtggtgtcatgctcgtcaactggcgtggtttcctatcagccccgaaatggcgcgggaatacttcctgcagcttcacgacgctgacctggcaagcactacgattgataagcattacgcaatgctgaatatgctgctctcacattgtgggttgcctccactgagcgacgacaagtctgtctcattggctatgaggcgaatcaggcgggaagcagctaccgagaagggtgaaaggactggacaggctatccccctgagatgggacgacctgaagctgctggatgtactgctcagcagaagcgaacggctggtggatctcaggaaccgagcgtttctttttgtggcatataacaccctgatgcgtatgtctgagatctcacggattcgggttggggacctagaccagacaggcgataccgtgaccctacacatctcacacacaaaaactatcactactgcggctgggctggacaaagtgctttccagacgtacgaccgccgtgctgaacgattggcttgacgtaagtggccttcgggagcatccagacgccgtgctgtttccccccatccatagatctaacaaggctcgaattacaactactcctctgaccgcgcccgctatggagaagatcttctccgatgcttgggtcctcctgaacaagagagacgctacccctaataagggaaggtacagaacttggacgggtcattctgccagagtaggtgccgcaatcgacatggccgagaagcaggtgtccatggtggagattatgcaggaggggacctggaaaaaacctgaaacccttatgaggtacctgcgaagaggtggggtgagtgtgggcgctaacagtaggctgatggacagtggatccggcgccacgaacttctctctgttaaagcaagcaggagacgtggaagaaaaccccggtcctggagtgtctaagggcgaagagctgattaaggagaacatgcacatgaagctgtacatggagggcaccgtggacaaccatcacttcaagtgcacatccgagggcgaaggcaagccctacgagggcacccagaccatgagaatcaaggtggtcgagggcggccctctccccttcgccttcgacatcctggctactagcttcctctacggcagcaagaccttcatcaaccacacccagggcatccccgacttcttcaagcagtccttccctgagggcttcacatgggagagagtcaccacatacgaagacgggggcgtgctgaccgctacccaggacaccagcctccaggacggctgcctcatctacaacgtcaagatcagaggggtgaacttcacatccaacggccctgtgatgcagaagaaaacactcggctgggaggccttcaccgagacgctgtaccccgctgacggcggcctggaaggcagaaacgacatggccctgaagctcgtgggcgggagccatctgatcgcaaacgccaagaccacatatagatccaagaaacccgctaagaacctcaagatgcctggcgtctactatgtggactacagactggaaagaatcaaggaggccaacaacgagacctacgtcgagcagcacgaggtggcagtggccagatactgcgacctccctagcaaactggggcacaagcttaattagtgaaacttgtttattgcagcttataatggttacaaataaagcaatagcatcacaaatttcacaaataaagcatttttttcactgcattctagttgtggtttgtccaaactcatcaatgtatcttaagggaaaatgtgaactgatagttaaccaagccacagagagctctgtggggagagaccaggtgacctcatgatgtccctcagtgctgcaggtctggagaaactgaccacagctcataggtcaggtgaccaacggaggcactgactaatcagattgtagtactgtgactgtggggatcattaagggtctagggtgaccgcaggctggagcttagggctagacatttgccacttgatacaaagggtgtcagcattctgtctgtcctatcttccagcccccctggttcccgtcctgccgcctcctttttagggcctctctacatagccttgactggcttgaactttctatgcagaccgggctgacctggagctcacagcagtctatctacctgtctgtgttctgagggttgggtagcagctcacccagctcctgcccccttccataaacaaccttaggcctctgaaggaaatgctgtctgcagcggacccaaggcttcttccctgtctttctgaggcctaaatccacagcttccccaatttcatcaactgctgcttcttctctttcctttcatattcggggaaaggaaaccactgtgggggcagggaggaggcctggcatcccagtctttattttcagatctcactggccactcgctttattggtgagccgagagggatcaggtgaggcagtatggggcagctgttgaggagactttgggctctcactctcggggaggtgatggtcattcctggaactcctccccccacacccagcctttctccccatgagctcatcacctctt

SEQ ID NO: 268 - DNA, 2187 bp, synthetic construct
  source 1..2187: mol_type = other DNA
gaggtgcagggctccacgccacaggaccagacatcttccttccttttgggggagctgtcaagacgccccagaagtcaaagcagaaaaggggaaccgaggccgcgggggcgggagcagtcgtgagtgggagaagggaagtgaggactgcctctcaggcaggactttctcacagcggatctgtccgggcctgcttggatcgctgcttcatctctagtgccaagtgggtggagcatggtcctggggagaggggcacctctgaatggatggcgtcccctaacgattccagggagcccttatccccggcaagggcatgtctggtgggttaaagaggcttgcagtagttggggaaatcaggacttgatttcggatccctgcgaaatgccgagcctcagtttatccctttgaggggatggcggtcctgatgtcgcaggggactaggcagtagtcaatcagttaaccaggaggcgtgactcctggaggcccggggccttctctccggactcacctgctggtctctgacaccacctccccccacatgtcattacttcagtttggaaattcctagatcgcaggggccagcgaggcaggaccacccctctctgccagggcacagtctccacccggaaataccgaagccctcgttccggaggggaaggcgcgaggtttcccggaaagtggccccgacagcaccgcccctcggccccccgtgagccagagactataaaagcgccgcccgcctcagtctgcacccagtgctagtgctgagctccgctgctacctgcactttgccctggccctgcaatggctcccagcagcccccggcccgcgctgcccgcactcctggtcctgctcggggctctgttcccaggacctggcaatgcccagacatctgtgtccccctcaaaagtcatcctgccccggggaggctccgtgctggtgacatgcagcacctcctgtgaccagcccaagttgttgggcatagagaccccgttgcctaaaaaggagttgctcctgcctgggaacaaccggaaggtgtatgaactgagcaatgtgcaagaagatagccaaccaatgtgctattcaaactgccctgatgggcagtcaacagctaaaaccttcctcaccgtgtactggactccagaacgggtggaactggcacccctcccctcttggcagccagtgggcaagaaccttaccctacgctgccaggtggagggtggggcaccccgggccaacctcaccgtggtgctgctccgtggggagaaggagctgaaacgggagccagctgtgggggagcccgctgaggtcacgaccacggtgctggtgaggagagatcaccatggagccaatttctcgtgccgcactgaactggacctgcggccccaagggctggcattgttctctaatgtctccgaggccaggagcctccggactttcggtgaggtccttcacagcgggcaagtgggttcttgggaggaagaagaccccagcaatgggggaaaggtgctgagaagatagtaatccagatagtgggagttttggggatggtgagctggctctgtgggtaaaggaagggacttgcatccaagcttgatgacctgagttcaattcccagcttccaaaggagaaactgactcctgaaagttgtcttttgacctccacaagtgagtcacatacatatatacacagcaaataaatgaataaaaagaaagaaaaagggtggtgtgtggggtggaccccagaggtccaactcatactgagtggcagcctccaggatcacaaacaacacttcttttgttctgcggccctggaggtggctgggcagttgctgttaaaaaaaacaacccagaccccggaactccacttgctcatgcctgtcttctcccccaagatcttccagctaccatcccaaagctcgacacccctgacctcctggaggtgggcacccagcagaagttgttttgctccctggaaggcctgtttcctgcctctgaagctcggatatacctggagctgggaggccagatgccgacccaggagagcacaaacagcagtgactctgtgtcagccactgccttggtagaggtgactgaggagttcgacagaaccctgccgctgcgctgcgttttggagctagcggaccagatcctggagacgcagaggaccttaacagtctacagtaagaag

SEQ ID NO: 269 - DNA, 4171 bp, synthetic construct
  source 1..4171: mol_type = other DNA
cagagcaaatgggttctacaggcctaacaacctatctataaagccaacttggtggtagaaagaatctcttgagctgaatcttgaatgacagctcaagggatagggaggacagggtgttcagaagcagagaagatgccttgtaaatgtggaaggctgtggcaggattggaaggactttggggtggtaggaaggggatgggaatgggtggttacaagagaaacaagactgtagtaaataaagctgaaactcaaagcaagctttcagcatctttaattggagacacaaacttcaaaggtatcatgaatgtggttgatcttggtgaaagttgagcttcacctgtcctaacaacagaccaatccatgagtgaaagcttatctttctcctttattaatggttgctgttgtatccataactcaattccaaaggatatgaaccttaacatatagatataattttgtgtaccttctatgaaacagcattaaagcaaagaagttcaaatagaaagactggcttagttattattaactaagagatgctagtgagttctaaattaataccatttaaaatttataatttgcagaattaccaccaccaccaccactcagcccaggaaaagttacaaagaactggctatccaatttgtttgttttcctcctttttagagttcttttatttatgtgtgagtgaatgccatgtacttatggatgcagaggctgtcagattccttgcagctggagtaatagacagttgtgagctacttatagtactagaactaagatcctatggaagagcagcgagtgccactaactgctgagccacctctccagcccatttctttatttttcaatgaacaaataataagcagtcctatgtgacatgcttctaaagcaaaagatataatatttagtattatatacattaataataaaatacattatcttctaagaattgaagtctcaactatgaaaatcagcagttctctgtcagagaagcccaagcgcttccacgcatgcttggagagggggttaagctttcgcagctacccactgctctgttcctcttcagtgaggagggtttttgtacagccagacagtggagtactaccactgtggtgcacagcaagactcactgtccaatatgcttgcttatttgaattacataacaccaaggtagatctagtacccttagtggtaatatataaaaactatcttcacaacaataatgggggatcctttaattctaaagaaacaagtatatgactaacaactaactgctgaacacaaacaaagaaagatgagatcatgggttaccttgaagtaaaagtagccatttatttacagctgtgtgctcaaaaaaagtaacttaaaattcactttaatttaagaattgttagatcagcagtctcaataagtgtatctattcagagtctctcatttatttttctaattcttgatacacaatggaattagtcttttgtgaagaaaagaatgagaaagaaattcttaaggaagatctagagacatacacttgcttcctcatggctatgctaaatttgaagttatatgaacattattgaaatttgctgtaaggtaaggtaaaactttgatcaaacttatacacaaattttccaattcaggaggtgtcatcctttaataattaaaatttaatctatttgaaaagtgtgctcaaatatttccagataattatatgacatgaactaaactataacagagcagagtgtatactgaggatggtagatacttagatgtgtttcagatagtgcatcttcatgatgcactgtgaaatctagcattagttagtatcctcaactaatttagtttctttaaactttcacagtgttttcacccatttcaatgtgaaagtgtatttttctattcgcctaaatgtggcttcagtgcctgatgattggagaattatttgtgagcacacctcagctttagatcacacacatggatactggctttcagagtgcattgtgaacaagactggaatgtaagatacctactaagcagcttcaaggaagagaggaaccagataatgctctcggaatattataaacagtttgagagagaagtatacctcaaagtactcaattgaacatcccttgtttagtgtatcaaatcaagctggtcttaagagaaatcaatgaacaatactttgtgacagatatgcaccacaaaagaggaagagaaaaacagaaatttccttctttgtaagtgtagtgtctacaaataagtagatattgtcctagattagccaggtttgcctttgttaacagaccacctgactttataagccgagaactccaaagactactatttgcatagttcatcctcagaaaccacaaatttctcacagttgttttaaagagatgcacttataggaagagcaataattagtcagagaccaggatcaaaaacacaatggattttcatgtgcagattttcagcttcatgctaatcagtgtcacaggtagagatgggtaggagtttgagttcagaaaacaaggttctttttcccaggaaagtttcataaagtagactttttctttcctctgaatattgaatgctatgaaattatttttgtatctctgtctactaacaccctctatctctttcactctctcttctgttgtttttccatagtcatattgtccagtggacagtctgtgctgactcagcctcgctcagtgtccgggtctcctggacagtcagtcaccatttcctgcactggaaccagcagtgatgtcggtgcttataactatgtctcctggtaccaacaacacccaggcaaagcccccaaattcatgatttatgatgtcgatcagcggccctcaggggtccctgatcgcttctctggctccaagtctggcaacacggcctccctgatcatctctgggctccaggctgaggatgaggctgattattactgctgctcatatgctggcagctacatttgggtgttcggcggagggacccaactgaccgtcctaggtaagtacacttttctcatctttttttatgtgtaagacacaggttttcatgttaggagttaaagtcagttcagaaaatcttgagaaaatggagagggctcattatcagttgacgtggcatacagtgtcagattttctgtttatcaagctagtgagattaggggcaaaaagaggctttagttgagaggaaagtaattaatactatggtcaccatccaagagattggatcggagaataagcatgagtagttattgagatctgggtctgactgcaggtagcgtggtcttctagacgtttaagtgggagatttggaggggatgaggaatgaaggaacttcaggatagaaaagggctgaagtcaagttcagctcctaaaatggatgtgggagcaaactttgaagataaactgaatgacccagaggatgaaacagcgcagatcaaagaggggcctggagctctgagaagagaaggagactcatccgtgttgagtttccacaagtactgtcttgagttttgcaataaaagtgggatagcagagttgagtgagccgtaggctgagttctctcttttgtctcctaagtttttatgactacaaaaatcagtagtatgtcctgaaataatcattaagctgtttgaaagtatgactgcttgccatgtagataccatggcttgctgaataatcagaagaggtgtgactcttattctaaaatttgtcacaaaatgtcaaaatgagagactctgtaggaacgagtccttgacagacagctcaaggggtttttttcctttgtctcatttctacatgaaagtaaatttgaaatgatcttttttattataagagtagaaatacagttgggtttgaactatatgttttaatggccacggttttgtaagacatttggtcctttgttttcccagttattactcgattgtaattttatatcgccagcaatggactgaaacggtccgcaacctcttctttacaactgggtgacctcgcggctgtgccagccatttggcgttcaccctgccgctaagggccatgtgaacccccgcggtagcatcccttgctccgcgtggaccactttcctgaggcacagtgataggaacagagccactaatctgaagagaacagagatgtgacagactacactaatgtgag

SEQ ID NO: 270 - DNA, 3923 bp, synthetic construct
  source 1..3923: mol_type = other DNA
cagccggagtgcgcagccgccggcagcctcgctctgcccactgggtggggcgggaggtaggtggggtgaggcgagctggacgtgcgggcgcggtcggcctctggcggggcgggggaggggagggagggtcagcgaaagtagctcgcgcgcgagcggccgcccaccctccccttcctctgggggagtcgttttacccgccgccggccgggcctcgtcgtctgattggctctcggggcccagaaaactggcccttgccattggctcgtgttcgtgcaagttgagtccatccgccggccagcgggggcggcgaggaggcgctcccaggttccggccctcccctcggccccgcgccgcagagtctggccgcgcgcccctgcgcaacgtggcaggaagcgcgcgctgggggcggggacgggcagtagggctgagcggctgcggggcgggtgcaagcacgtttccgacttgagttgcctcaagaggggcgtgctgagccagacctccatcgcgcactccggggagtggagggaaggagcgagggctcagttgggctgttttggaggcaggaagcacttgctctcccaaagtcgctctgagttgttatcagtaagggagctgcagtggagtaggcggggagaaggccgcacccttctccggaggggggaggggagtgttgcaatacctttctgggagttctctgctgcctcctggcttctgaggaccgccctgggcctgggagaatcccttccccctcttccctcgtgatctgcaactccagtctttctagaagatgggcgggagtccgttacataacttacggtaaatggcccgcctggctgaccgcccaacgacccccgcccattgacgtcaataatgacgtatgttcccatagtaacgccaatagggactttccattgacgtcaatgggtggagtatttacggtaaactgcccacttggcagtacatcaagtgtatcatatgccaagtacgccccctattgacgtcaatgacggtaaatggcccgcctggcattatgcccagtacatgaccttatgggactttcctacttggcagtacatctacgtattagtcatcgctattaccatggtcgaggtgagccccacgttctgcttcactctccccatctcccccccctccccacccccaattttgtatttatttattttttaattattttgtgcagcgatgggggcggggggggggggggggcgcgcgccaggcggggcggggcggggcgaggggcggggcggggcgaggcggagaggtgcggcggcagccaatcagagcggcgcgctccgaaagtttccttttatggcgaggcggcggcggcggcggccctataaaaagcgaagcgcgcggcgggcggggagtcgctgcgacgctgccttcgccccgtgccccgctccgccgccgcctcgcgccgcccgccccggctctgactgaccgcgttactcccacaggtgagcgggcgggacggcccttctcctccgggctgtaattagcgcttggtttaatgacggcttgtttcttttctgtggctgcgtgaaagccttgaggggctccgggagggccctttgtgcggggggagcggctcggggggtgcgtgcgtgtgtgtgtgcgtggggagcgccgcgtgcggctccgcgctgcccggcggctgtgagcgctgcgggcgcggcgcggggctttgtgcgctccgcagtgtgcgcgaggggagcgcggccgggggcggtgccccgcggtgcggggggggctgcgaggggaacaaaggctgcgtgcggggtgtgtgcgtgggggggtgagcagggggtgtgggcgcgtcggtcgggctgcaaccccccctgcacccccctccccgagttgctgagcacggcccggcttcgggtgcggggctccgtacggggcgtggcgcggggctcgccgtgccgggcggggggtggcggcaggtgggggtgccgggcggggcggggccgcctcgggccggggagggctcgggggaggggcgcggcggcccccggagcgccggcggctgtcgaggcgcggcgagccgcagccattgccttttatggtaatcgtgcgagagggcgcagggacttcctttgtcccaaatctgtgcggagccgaaatctgggaggcgccgccgcaccccctctagcgggcgcggggcgaagcggtgcggcgccggcaggaaggaaatgggcggggagggccttcgtgcgtcgccgcgccgccgtccccttctccctctccagcctcggggctgtccgcggggggacggctgccttcgggggggacggggcagggcggggttcggcttctggcgtgtgaccggcggctctagagcctctgctaaccatgttcatgccttcttctttttcctacagctcctgggcaacgtgctggttattgtgctgtctcatcattttggcaaagaattgatttgataccgcgggcccataacttcgtataatgtatgctatacgaagttattcgcgatgaataaatgaaagcttgcagatctgcgactctagaggatctgcgactctagaggatcataatcagccataccacatttgtagaggttttacttgctttaaaaaacctcccacacctccccctgaacctgaaacataaaatgaatgcaattgttgttgttaacttgtttattgcagcttataatggttacaaataaagcaatagcatcacaaatttcacaaataaagcatttttttcactgcattctagttgtggtttgtccaaactcatcaatgtatcttatcatgtctggatctgcgactctagaggatcataatcagccataccacatttgtagagggaagatgggcgggagtcttctggtgatcagcctcgactgtgccttctagttgccagccatctgttgtttgcccctcccccgtgccttccttgaccctggaaggtgccactcccactgtcctttcctaataaaatgaggaaattgcatcgcattgtctgagtaggtgtcattctattctggggggtggggtggggcaggacagcaagggggaggattgggaagacaatggcaggcatgctggggatgcggtgggctctatggtctgggcattctgggcaggcttaaaggctaacctggtgtgtgggcgttgtcctgcaggggaattgaacaggtgtaaaattggagggacaagacttcccacagattttcggttttgtcgggaagttttttaataggggcaaataaggaaaatgggaggataggtagtcatctggggttttatgcagcaaaactacaggttattattgcttgtgatccgcctcggagtattttccatcgaggtagattaaagacatgctcacccgagttttatactctcctgcttgagatccttactacagtatgaaattacagtgtcgcgagttagactatgtaagcagaattttaatcatttttaaagagcccagtacttcatatccatttctcccgctccttctgcagccttatcaaaaggtattttagaacactcattttagccccattttcatttattatactggcttatccaacccctagacagagcattggcattttccctttcctgatcttagaagtctgatgactcatgaaaccagacagattagttacatacaccacaaatcgaggctgtagctggggcctcaacactgcagttcttttataactccttagtacactttttgttgatcctttgccttgatccttaattttcagtgtctatcacctctcccgtcaggtggtgttccacatttgggcctattctcagtccagggagttttacaacaatagatgtattgagaatccaacctaaagcttaactttccactcccatgaatgcctctctcctttttctccatttataaactgagct

SEQ ID NO: 271 - DNA, 3558 bp, synthetic construct
  source 1..3558: mol_type = other DNA
gcagcacacctttgatagctatgtgttggagccagcttgttctactgagcaagtcctaggacagccaaagctacacagagaaactttgtctaaaattgaaaacaacaacaacaacaacaacaacaacaacaacaacaacaacaaaaacccatgaagcaaaacaaaacaaaaactaggaaggggttgagcaagttgcctctttcctttgctttctgaatggaacctgcaagtcaattgtggcccctgctcctacgctctctttgtcctccagcaccatggttcctccccaactgagtggtcctccctccccaactgctataaatctggcttgaccaggtcaccaacaaaccttgctacctcttaaccaataaacatgatggcctggaggaagtaggtatagaaacccctcccttttcaggatgccagctgggaggggctgagagaaagtaaagtatttatttcagtccacttctgaaagaccttgtcactgtgcctgcaacctggtcagagaggaagtaaggactggtgtcaggagggagctgctaggtggcaaagggaagagccctcaggatagggctggggttgggagtgtgggattaggaggaaaatgctgggtgggtggtgggtgagagaagtagacagacatgtattccttggggaaagctgtgtgtgtgtgggggggggggttggagggagggaaattggatgcctcagctttgtgagactgaagggatgtgactggtgaattactaaccagcttcgacttccaaggttttatctgtgcagcccttctcccaggatggctggagacatgagagctgccaacctttggccaagcccgctcatgatcaaacgctctaagaagaacagcctggccttgtccctgacggccgaccagatggtcagtgccttgttggatgctgagccccccatactctattccgagtatgatcctaccagacccttcagtgaagcttcgatgatgggcttactgaccaacctggcagacagggagctggttcacatgatcaactgggcgaagagggtgccaggctttgtggatttgaccctccatgatcaggtccaccttctagaatgtgcctggctagagatcctgatgattggtctcgtctggcgctccatggagcacccagtgaagctactgtttgctcctaacttgctcttggacaggaaccagggaaaatgtgtagagggcatggtggagatcttcgacatgctgctggctacatcatctcggttccgcatgatgaatctgcagggagaggagtttgtgtgcctcaaatctattattttgcttaattctggagtgtacacatttctgtccagcaccctgaagtctctggaagagaaggaccatatccaccgagtcctggacaagatcacagacactttgatccacctgatggccaaggcaggcctgaccctgcagcagcagcaccagcggctggcccagctcctcctcatcctctcccacatcaggcacatgagtaacaaaggcatggagcatctgtacagcatgaagtgcaagaacgtggtgcccctctatgacctgctgctggaggcggcggacgcccaccgcctacatgcgcccactagccgtggaggggcatccgtggaggagacggaccaaagccacttggccactgcgggctctacttcatcgcattccttgcaaaagtattacatcacgggggaggcagagggtttccctgccacagctgtcgacaatttactgaccgtacaccaaaatttgcctgcattaccggtcgatgcaacgagtgatgaggttcgcaagaacctgatggacatgttcagggatcgccaggcgttttctgagcatacctggaaaatgcttctgtccgtttgccggtcgtgggcggcatggtgcaagttgaataaccggaaatggtttcccgcagaacctgaagatgttcgcgattatcttctatatcttcaggcgcgcggtctggcagtaaaaactatccagcaacatttgggccagctaaacatgcttcatcgtcggtccgggctgccacgaccaagtgacagcaatgctgtttcactggttatgcggcggatccgaaaagaaaacgttgatgccggtgaacgtgcaaaacaggctctagcgttcgaacgcactgatttcgaccaggttcgttcactcatggaaaatagcgatcgctgccaggatatacgtaatctggcatttctggggattgcttataacaccctgttacgtatagccgaaattgccaggatcagggttaaagatatctcacgtactgacggtgggagaatgttaatccatattggcagaacgaaaacgctggttagcaccgcaggtgtagagaaggcacttagcctgggggtaactaaactggtcgagcgatggatttccgtctctggtgtagctgatgatccgaataactacctgttttgccgggtcagaaaaaatggtgttgccgcgccatctgccaccagccagctatcaactcgcgccctggaagggatttttgaagcaactcatcgattgatttacggcgctaaggatgactctggtcagagatacctggcctggtctggacacagtgcccgtgtcggagccgcgcgagatatggcccgcgctggagtttcaataccggagatcatgcaagctggtggctggaccaatgtaaatattgtcatgaactatatccgtaacctggatagtgaaacaggggcaatggtgcgcctcccaggatggacacttgtcacattgcaaagtcctgtgtgctcatccttcttgtggtcctactgtgtgcagaaagaggtgagatgaaaaatgggagaggggcaggagggtacaatggagatagaaaagggcctcagggttgtgggtacacctgcacctccattgtgtgcgtggtgactgaggtgtcctggagcaaggggatcaggaattggcttgtgatggtgaagcctcctatgctgagtgctgggtctgtaaccctgccagcgaaaccatcatcacataccagaaagtctcttggacctcactacctgtgccccaaccctagccaccagaacccttagattctacactgctgcactggcttcccagtcaggccactggcctgtgtgcactcaaactggcagagtcttcttttccttcccacctgccaagtcacggggctaggaatccttaactctaggcatttgactttttgttacgtcatgtgagacctgaatgctagaacttgcttactctaagaggtttgagctctcagatacccctagacttctagttacatctgtgttgtgggaagcctcatggtgagcctctttgagttggactctgggaagttcagtgctctgtcatgcgtcatttcccaggggccagctctgaagttgtaggtttgaataggtcagaacaaccctccccacttggttgccccagtacctgcttatacacccactcacctattcagcagacatttagtatgtgcatcttcccaatatgctgactgtctctctggtacatcttggagtccaggactc

SEQ ID NO: 272 - DNA, 4503 bp, synthetic construct
  source 1..4503: mol_type = other DNA
ggaggtaggtggggtgaggcgagctggacgtgcgggcgcggtcggcctctggcggggcgggggaggggagggagggtcagcgaaagtagctcgcgcgcgagcggccgcccaccctccccttcctctgggggagtcgttttacccgccgccggccgggcctcgtcgtctgattggctctcggggcccagaaaactggcccttgccattggctcgtgttcgtgcaagttgagtccatccgccggccagcgggggcggcgaggaggcgctcccaggttccggccctcccctcggccccgcgccgcagagtctggccgcgcgcccctgcgcaacgtggcaggaagcgcgcgctgggggcggggacgggcagtagggctgagcggctgcggggcgggtgcaagcacgtttccgacttgagttgcctcaagaggggcgtgctgagccagacctccatcgcgcactccggggagtggagggaaggagcgagggctcagttgggctgttttggaggcaggaagcacttgctctcccaaagtcgctctgagttgttatcagtaagggagctgcagtggagtaggcggggagaaggccgcacccttctccggaggggggaggggagtgttgcaatacctttctgggagttctctgctgcctcctggcttctgaggaccgccctgggcctgggagaatcccttccccctcttccctcgtgatctgcaactccagtctttctagttaattaaccgtttaaacaattctgcaggaatctagttattaatagtaatcaattacggggtcattagttcatagcccatatatggagttccgcgttacataacttacggtaaatggcccgcctggctgaccgcccaacgacccccgcccattgacgtcaataatgacgtatgttcccatagtaacgccaatagggactttccattgacgtcaatgggtggagtatttacggtaaactgcccacttggcagtacatcaagtgtatcatatgccaagtacgccccctattgacgtcaatgacggtaaatggcccgcctggcattatgcccagtacatgaccttatgggactttcctacttggcagtacatctacgtattagtcatcgctattaccatggtcgaggtgagccccacgttctgcttcactctccccatctcccccccctccccacccccaattttgtatttatttattttttaattattttgtgcagcgatgggggcggggggggggggggggcgcgcgccaggcggggcggggcggggcgaggggcggggcggggcgaggcggagaggtgcggcggcagccaatcagagcggcgcgctccgaaagtttccttttatggcgaggcggcggcggcggcggccctataaaaagcgaagcgcgcggcgggcggggagtcgctgcgacgctgccttcgccccgtgccccgctccgccgccgcctcgcgccgcccgccccggctctgactgaccgcgttactcccacaggtgagcgggcgggacggcccttctcctccgggctgtaattagcgcttggtttaatgacggcttgtttcttttctgtggctgcgtgaaagccttgaggggctccgggagggccctttgtgcggggggagcggctcggggggtgcgtgcgtgtgtgtgtgcgtggggagcgccgcgtgcggctccgcgctgcccggcggctgtgagcgctgcgggcgcggcgcggggctttgtgcgctccgcagtgtgcgcgaggggagcgcggccgggggcggtgccccgcggtgcggggggggctgcgaggggaacaaaggctgcgtgcggggtgtgtgcgtgggggggtgagcagggggtgtgggcgcgtcggtcgggctgcaaccccccctgcacccccctccccgagttgctgagcacggcccggcttcgggtgcggggctccgtacggggcgtggcgcggggctcgccgtgccgggcggggggtggcggcaggtgggggtgccgggcggggcggggccgcctcgggccggggagggctcgggggaggggcgcggcggcccccggagcgccggcggctgtcgaggcgcggcgagccgcagccattgccttttatggtaatcgtgcgagagggcgcagggacttcctttgtcccaaatctgtgcggagccgaaatctgggaggcgccgccgcaccccctctagcgggcgcggggcgaagcggtgcggcgccggcaggaaggaaatgggcggggagggccttcgtgcgtcgccgcgccgccgtccccttctccctctccagcctcggggctgtccgcggggggacggctgccttcgggggggacggggcagggcggggttcggcttctggcgtgtgaccggcggctctagagcctctgctaaccatgttcatgccttcttctttttcctacagctcctgggcaacgtgctggttattgtgctgtctcatcattttggcaaagaattgatttgataccgcgggccctaagaagttcctattctctagaaagtataggaacttcgtcgacatttaaatcatttaaatataacttcgtataatgtatgctatacgaagttattcgcgatgaataaatgaaagcttgcagatctgcgactctagaggatctgcgactctagaggatcataatcagccataccacattttgtagaggttttacttgctttaaaaaacctcccacacctccccctgaacctgaaacataaaatgaatgcaattgttgttgttaacttgtttattgcagcttataatggttacaaataaagcaatagcatcacaaatttcacaaataaagcatttttttcactgcattctagttgtggtttgtccaaactcatcaatgtatcttatcatgtctggatctgcgactctagaggatcataatcagccataccacatttgtagaggttttacttgctttaaaaaacctcccacacctccccctgaacctgaaacataaaatgaatgcaattgttgttgttaacttgtttattgcagcttataatggttacaaataaagcaatagcatcacaaatttcacaaataaagcatttttttcactgcattctagttgtggtttgtccaaactcatcaatgtatcttatcatgtctggatctgcgactctagaggatcataatcagccataccacatttgtagaggttttacttgctttaaaaaacctcccacacctccccctgaacctgaaacataaaatgaatgcaattgttgttgttaacttgtttattgcagcttataatggttacaaataaagcaatagcatcacaaatttcacaaataaagcatttttttcactgcattctagttgtggtttgtccaaactcatcaatgtatcttatcatgtctggatccccatcaagctgatccggaacccttaatataacttcgtataatgtatgctatacgaagttattaggtccctcgacctgcagcctcgactgtgccttctagttgccagccatctgttgtttgcccctcccccgtgccttccttgaccctggaaggtgccactcccactgtcctttcctaataaaatgaggaaattgcatcgcattgtctgagtaggtgtcattctattctggggggtggggtggggcaggacagcaagggggaggattgggaagacaatagcaggcatgctggggatgcggtgggctctataattcacagtgtcgcgagttagactatgtaagcagaattttaatcatttttaaagagcccagtacttcatatccatttctcccgctccttctgcagccttatcaaaaggtattttagaacactcattttagccccattttcatttattatactggcttatccaacccctagacagagcattggcattttccctttcctgatcttagaagtctgatgactcatgaaaccagacagattagttacatacaccacaaatcgaggctgtagctggggcctcaacactgcagttcttttataactccttagtacactttttgttgatcctttgccttgatccttaattttcagtgtctatcacctctcccgtcaggtggtgttccacatttgggcctattctcagtccagggagttttacaacaatagatgtattgagaatccaacctaaagcttaactttccactcccatgaatgcctctctcctttttctccatttataaactgagctattaaccattaatggtttccaggtggatgtctcctcccccaatattacctgatgtatcttacatattgccaggctgatattttaagacattaaaaggtatatttcattattgagccacatggtattgattactgcttactaaaattttgtcattgtacacatctgtaaaaggtggttccttttggaatgcaaagttcaggtgtttgttgtctttcctgacctaaggtcttgtgagcttgtattttttctatttaagcagtgctttctcttggactggcttgactc

SEQ ID NO: 273 - DNA, 3639 bp, synthetic construct
  source 1..3639: mol_type = other DNA
cagccggagtgcgcagccgccggcagcctcgctctgcccactgggtggggcgggaggtaggtggggtgaggcgagctggacgtgcgggcgcggtcggcctctggcggggcgggggaggggagggagggtcagcgaaagtagctcgcgcgcgagcggccgcccaccctccccttcctctgggggagtcgttttacccgccgccggccgggcctcgtcgtctgattggctctcggggcccagaaaactggcccttgccattggctcgtgttcgtgcaagttgagtccatccgccggccagcgggggcggcgaggaggcgctcccaggttccggccctcccctcggccccgcgccgcagagtctggccgcgcgcccctgcgcaacgtggcaggaagcgcgcgctgggggcggggacgggcagtagggctgagcggctgcggggcgggtgcaagcacgtttccgacttgagttgcctcaagaggggcgtgctgagccagacctccatcgcgcactccggggagtggagggaaggagcgagggctcagttgggctgttttggaggcaggaagcacttgctctcccaaagtcgctctgagttgttatcagtaagggagctgcagtggagtaggcggggagaaggccgcacccttctccggaggggggaggggagtgttgcaatacctttctgggagttctctgctgcctcctggcttctgaggaccgccctgggcctgggagaatcccttccccctcttccctcgtgatctgcaactccagtctttctagaagatgggcgggagtccgtatgttcccatagtaacgccaatagggactttccattgacgtcaatgggtggagtatttacggtaaactgcccacttggcagtacatcaagtgtatcatatgccaagtacgccccctattgacgtcaatgacggtaaatggcccgcctggcattatgcccagtacatgaccttatgggactttcctacttggcagtacatctacgtattagtcatcgctattaccatggtcgaggtgagccccacgttctgcttcactctccccatctcccccccctccccacccccaattttgtatttatttattttttaattattttgtgcagcgatgggggcggggggggggggggggcgcgcgccaggcggggcggggcggggcgaggggcggggcggggcgaggcggagaggtgcggcggcagccaatcagagcggcgcgctccgaaagtttccttttatggcgaggcggcggcggcggcggccctataaaaagcgaagcgcgcggcgggcggggagtcgctgcgacgctgccttcgccccgtgccccgctccgccgccgcctcgcgccgcccgccccggctctgactgaccgcgttactcccacaggtgagcgggcgggacggcccttctcctccgggctgtaattagcgcttggtttaatgacggcttgtttcttttctgtggctgcgtgaaagccttgaggggctccgggagggccctttgtgcggggggagcggctcggggggtgcgtgcgtgtgtgtgtgcgtggggagcgccgcgtgcggctccgcgctgcccggcggctgtgagcgctgcgggcgcggcgcggggctttgtgcgctccgcagtgtgcgcgaggggagcgcggccgggggcggtgccccgcggtgcggggggggctgcgaggggaacaaaggctgcgtgcggggtgtgtgcgtgggggggtgagcagggggtgtgggcgcgtcggtcgggctgcaaccccccctgcacccccctccccgagttgctgagcacggcccggcttcgggtgcggggctccgtacggggcgtggcgcggggctcgccgtgccgggcggggggtggcggcaggtgggggtgccgggcggggcggggccgcctcgggccggggagggctcgggggaggggcgcggcggcccccggagcgccggcggctgtcgaggcgcggcgagccgcagccattgccttttatggtaatcgtgcgagagggcgcagggacttcctttgtcccaaatctgtgcggagccgaaatctgggaggcgccgccgcaccccctctagcgggcgcggggcgaagcggtgcggcgccggcaggaaggaaatgggcggggagggccttcgtgcgtcgccgcgccgccgtccccttctccctctccagcctcggggctgtccgcggggggacggctgccttcgggggggacggggcagggcggggttcggcttctggcgtgtgaccggcggctctctcctgggcaacgtgctggttattgtgctgtctcatcattttggcaaagaattcctcgaggggcaaagaattcatgaggccggccaccatgtccgtcctgacgccgctgctgctgcggggcttgacaggctcggcccggcggctcccagtgccgcgcgccaagatccattcgttgggggatctgtccgtcctgacgccgctgctgctgcggggcttgacaggctcggcccggcggctcccagtgccgcgcgccaagatccattcgttgggggatccaccggtcgccaccgagatggcaagccagcagggcgagacgatgtccggaccgctgcacattggtttgattcccacagttggaccgtacctgctaccgcatattatccctatgctgcaccagacctttccaaagctggaaatgtatctgcatgaagcacagacccaccagttactggcgcaactggacagcggcaaactcgattgcgtgatcctcgcgctggtgaaagagagcgaagcattcattgaagtgccgttgtttgatgagccaatgttgctggctttctgggcaggcttaaaggctaacctggtgtgtgggcgttgtcctgcaggggaattgaacaggtgtaaaattggagggacaagacttcccacagattttcggttttgtcgggaagttttttaataggggcaaataaggaaaatgggaggataggtagtcatctggggttttatgcagcaaaactacaggttattattgcttgtgatccgcctcggagtattttccatcgaggtagattaaagacatgctcacccgagttttatactctcctgcttgagatccttactacagtatgaaattacagtgtcgcgagttagactatgtaagcagaattttaatcatttttaaagagcccagtacttcatatccatttctcccgctccttctgcagccttatcaaaaggtattttagaacactcattttagccccattttcatttattatactggcttatccaacccctagacagagcattggcattttccctttcctgatcttagaagtctgatgactcatgaaaccagacagattagttacatacaccacaaatcgaggctgtagctggggcctcaacactgcagttcttttataactccttagtacactttttgttgatcctttgccttgatccttaattttcagtgtctatcacctctcccgtcaggtggtgttccacatttgggcctattctcagtccagggagttttacaacaatagatgtattgagaatccaacctaaagcttaactttccactcccatgaatgcctctctcctttttctccatttataaactgagct

SEQ ID NO: 274 - DNA, 3874 bp, synthetic construct
  source 1..3874: mol_type = other DNA
gtgcgcagccgccggcagcctcgctctgcccactgggtggggcgggaggtaggtggggtgaggcgagctggacgtgcgggcgcggtcggcctctggcggggcgggggaggggagggagggtcagcgaaagtagctcgcgcgcgagcggccgcccaccctccccttcctctgggggagtcgttttacccgccgccggccgggcctcgtcgtctgattggctctcggggcccagaaaactggcccttgccattggctcgtgttcgtgcaagttgagtccatccgccggccagcgggggcggcgaggaggcgctcccaggttccggccctcccctcggccccgcgccgcagagtctggccgcgcgcccctgcgcaacgtggcaggaagcgcgcgctgggggcggggacgggcagtagggctgagcggctgcggggcgggtgcaagcacgtttccgacttgagttgcctcaagaggggcgtgctgagccagacctccatcgcgcactccggggagtggagggaaggagcgagggctcagttgggctgttttggaggcaggaagcacttgctctcccaaagtcgctctgagttgttatcagtaagggagctgcagtggagtaggcggggagaaggccgcacccttctccggaggggggaggggagtgttgcaatacctttctgggagttctctgctgcctcctggcttctgaggaccgccctgggcctgggagaatcccttccccctcttccctcgtgatctgcaactccagtctttctagaagatgggcgggagtcataacttcgtataatgtatgctatacgaagttattcgcgatgaataaatgaaagcttgcagatctgcgactctagaggatctgcgactctagaggatcataatcagccataccacattttgtagaggttttacttgctttaaaaaacctcccacacctccccctgaacctgaaacataaaatgaatgcaattgttgttgttaacttgtttattgcagcttataatggttacaaataaagcaatagcatcacaaatttcacaaataaagcatttttttcactgcattctagttgtggtttgtccaaactcatcaatgtatcttatcatgtctggatctgcgactctagaggatcataatcagccataccacatttgtagaggttttacttgctttaaaaaacctcccacacctccccctgaacctgaaacataaaatgaatgcaattgttgttgttaacttgtttattgcagcttataatggttacaaataaagcaatagcatcacaaatttcacaaataaagcatttttttcactgcattctagttgtggtttgtccaaactcatcaatgtatcttatcatgtctggatctgcgactctagaggatcataatcagccataccacatttgtagaggttttacttgctttaaaaaacctcccacacctccccctgaacctgaaacataaaatgaatgcaattgttgttgttaacttgtttattgcagcttataatggttacaaataaagcaatagcatcacaaatttcacaaataaagcatttttttcactgcattctagttgtggtttgtccaaactcatcaatgtatcttatcatgtctggatccccatcaagctgatccggaacccttaatataacttcgtataatgtatgctatacgaagttattaggtccctcgacccaacgagtcttttgtcatctacaggtgcagcccaagctagatcgaatttctagactcgagtggatccgccaccatggaaaacatgttccttcagtcgtcaatgctgacctgcattttcctgctaatatctggttcctgtgagttatgcgccgaagaaaatttttctagaagctatccttgtgatgagaaaaagcaaaatgactcagttattgcagagtgcagcaatcgtcgactacaggaagttccccaaacggtgggcaaatatgtgacagaactagacctgtctgataatttcatcacacacataacgaatgaatcatttcaagggctgcaaaatctcactaaaataaatctaaaccacaaccccaatgtacagcaccagaacggaaatcccggtatacaatcaaatggcttgaatatcacagacggggcattcctcaacctaaaaaacctaagggagttactgcttgaagacaaccagttaccccaaataccctctggtttgccagagtctttgacagaacttagtctaattcaaaacaatatatacaacataactaaagagggcatttcaagacttataaacttgaaaaatctctatttggcctggaactgctattttaacaaagtttgcgagaaaactaacatagaagatggagtatttgaaacgctgacaaatttggagttgctatcactatctttcaattctctttcacacgtgccacccaaactgccaagctccctacgcaaactttttctgagcaacacccagatcaaatacattagtgaagaagatttcaagggattgataaatttaacattactagatttaagcgggaactgtccgaggtgcttcaatgccccatttccatgcgtgccttgtgatggtggtgcttcaattaatatagatcgttttgcttttcaaaacttgacccaacttcgatacctaaacctctctagcacttccctcaggaagattaatgctgcctggtttaaaaatatgcctcatctgaaggtgctggatcttgaattcaactatttagtgggagaaatagcctctggggcatttttaacgatgctgccccgcttagaaatacttgacttgtcttttaactatataaaggggagttatccacagcatattaatatttccagaaacttctctaaacttttgtctctacgggcattgcatttaagaggttatgtgttccaggaactcagagaagatgatttccagcccctgatgcagcttccaaacttatcgactatcaacttgggtattaattttattaagcaaatcgatttcaaacttttccaaaatttctccaatctggaaattatttacttgtcagaaaacagaatatcattctgggcaggcttaaaggctaacctggtgtgtgggcgttgtcctgcaggggaattgaacaggtgtaaaattggagggacaagacttcccacagattttcggttttgtcgggaagttttttaataggggcaaataaggaaaatgggaggataggtagtcatctggggttttatgcagcaaaactacaggttattattgcttgtgatccgcctcggagtattttccatcgaggtagattaaagacatgctcacccgagttttatactctcctgcttgagatccttactacagtatgaaattacagtgtcgcgagttagactatgtaagcagaattttaatcatttttaaagagcccagtacttcatatccatttctcccgctccttctgcagccttatcaaaaggtattttagaacactcattttagccccattttcatttattatactggcttatccaacccctagacagagcattggcattttccctttcctgatcttagaagtctgatgactcatgaaaccagacagattagttacatacaccacaaatcgaggctgtagctggggcctcaacactgcagttcttttataactccttagtacactttttgttgatcctttgccttgatccttaattttcagtgtctatcacctctcccgtcaggtggtgttccacatttgggcctattctcagtccagggagttttacaacaatagatgtattgagaatccaacctaaagcttaactttccactcccatgaatgcctctctcctttttctccatttataaactg

SEQ ID NO: 275 - DNA, 3874 bp, synthetic construct; identical to SEQ ID NO: 274
  source 1..3874: mol_type = other DNA

SEQ ID NO: 276 - DNA, 4503 bp, synthetic construct; identical to SEQ ID NO: 272
  source 1..4503: mol_type = other DNA

SEQ ID NO: 277 - DNA, 3114 bp, synthetic construct
  source 1..3114: mol_type = other DNA
ggagtcgttttacccgccgccggccgggcctcgtcgtctgattggctctcggggcccagaaaactggcccttgccattggctcgtgttcgtgcaagttgagtccatccgccggccagcgggggcggcgaggaggcgctcccaggttccggccctcccctcggccccgcgccgcagagtctggccgcgcgcccctgcgcaacgtggcaggaagcgcgcgctgggggcggggacgggcagtagggctgagcggctgcggggcgggtgcaagcacgtttccgacttgagttgcctcaagaggggcgtgctgagccagacctccatcgcgcactccggggagtggagggaaggagcgagggctcagttgggctgttttggaggcaggaagcacttgctctcccaaagtcgctctgagttgttatcagtaagggagctgcagtggagtaggcggggagaaggccgcacccttctccggaggggggaggggagtgttgcaatacctttctgggagttctctgctgcctcctggcttctgaggaccgccctgggcctgggagaatcccttccccctcttccctcgtgatctgcaactccagtctttctagaagatgggcgggagtcggggttggggttgcgccttttccaaggcagccctgggtttgcgcagggacgcggctgctctgggcgtggttccgggaaacgcagcggcgccgaccctgggtctcgcacattcttcacgtccgttcgcagcgtcacccggatcttcgccgctacccttgtgggccccccggcgacgcttcctgctccgcccctaagtcgggaaggttccttgcggttcgcggcgtgccggacgtgacaaacggaagccgcacgtctcactagtaccctcgcagacggacagcgccagggagcaatggcagcgcgccgaccgcgatgggctgtggccaatagcggctgctcagcagggcgcgccgagagcagcggccgggaaggggcggtgcgggaggcggggtgtggggcggtagtgtgggccctgttcctgcccgcgcggtgttccgcattctgcaagcctccggagcgcacgtcggcagtcggctccctcgttgaccgaatcaccgacctctctccccaggaacttcgtcgacatttaaatcatttaaatataacttcgtataatgtatgctatacgaagttattcgcgatgaataaatgaaagcttgcagatctgcgactctagaggatctgcgactctagaggatcataatcagccataccacatttgtagaggttttacttgctttaaaaaacctcccacacctccccctgaacctgaaacataaaatgaatgcaattgttgttgttaacttgtttattgcagcttataatggttacaaataaagcaatagcatcacaaatttcacaaataaagcatttttttcactgcattctagttgtggtttgtccaaactcatcaatgtatcttatcatgtctggatctgcgactctagaggatcataatcagccataccacatttgtagaggttttacttgctttaaaaaacctcccacacctccccctgaacctgaaacataaaatgaatgcaattgttgttgttaacttgtttattgcagcttataatggttacaaataaagcaatagcatcacaaatttcacaaataaagcatttttttcactgcattctagttgtggtttgtccaaactcatcaatgtatcttatcatgtctggatctgcgactctagaggatcataatcagccataccacatttgtagaggttttacttgctttaaaaaacctcccacacctccccctgaacctgaaacataaaatgaatgcaattgttgttgttaacttgtttattgcagcttataatggttacaaataaagcaatagcatcacaaatttcacaaataaagcatttttttcactgcattctagttgtggtttgtccaaactcatcaatgtatcttatcatgtctggatccccatcaagctgatccggaacccttaatataacttcgtataatgtatgctatacgaagttatttaggtccctcgacctgcagcctcgactgtgccttctagttgccagccatctgttgtttgcccctcccccgtgccttccttgaccctggaaggtgccactcccactgtcctttcctaataaaatgaggaaattgcatcgcattgtctgagtaggtgtcattctattctggggggtggggtggggcaggacagcaagggggaggattgggaagacaatagcaggcatgctggggatgcggtgggctctatttctgggcaggcttaaaggctaacctggtgtgtgggcgttgtcctgcaggggaattgaacaggtgtaaaattggagggacaagacttcccacagattttcggttttgtcgggaagttttttaataggggcaaataaggaaaatgggaggataggtagtcatctggggttttatgcagcaaaactacaggttattattgcttgtgatccgcctcggagtattttccatcgaggtagattaaagacatgctcacccgagttttatactctcctgcttgagatccttactacagtatgaaattacagtgtcgcgagttagactatgtaagcagaattttaatcatttttaaagagcccagtacttcatatccatttctcccgctccttctgcagccttatcaaaaggtattttagaacactcattttagccccattttcatttattatactggcttatccaacccctagacagagcattggcattttccctttcctgatcttagaagtctgatgactcatgaaaccagacagattagttacatacaccacaaatcgaggctgtagctggggcctcaacactgcagttcttttataactccttagtacactttttgttgatcctttgccttgatccttaattttcagtgtctatcacctctcccgtcaggtggtgttccacatttgggcctattctcagtccagggagttttacaacaatagatgtattgagaatccaacctaaagcttaactttccactcccatgaatgcctctctcctttttctccatttataaactgagct

SEQ ID NO: 278 - DNA, 4345 bp, synthetic construct
  source 1..4345: mol_type = other DNA
aacctcccacacctccccctgaacctgaaacataaaatgaatgcaattgttgttgttaacttgtttattgcagcttataatggttacaaataaagcaatagcatcacaaatttcacaaataaagcatttttttcactgcattctagttgtggtttgtccaaactcatcaatgtatcttatcatgtctggatctgcgactctagaggatcataatcagccataccacatttgtagaggttttacttgctttaaaaaacctcccacacctccccctgaacctgaaacataaaatgaatgcaattgttgttgttaacttgtttattgcagcttataatggttacaaataaagcaatagcatcacaaatttcacaaataaagcatttttttcactgcattctagttgtggtttgtccaaactcatcaatgtatcttatcatgtctggatctgcgactctagaggatcataatcagccataccacatttgtagaggttttacttgctttaaaaaacctcccacacctccccctgaacctgaaacataaaatgaatgcaattgttgttgttaacttgtttattgcagcttataatggttacaaataaagcaatagcatcacaaatttcacaaataaagcatttttttcactgcattctagttgtggtttgtccaaactcatcaatgtatcttatcatgtctggatccccatcaagctgatccggaacccttaatataacttcgtataatgtatgctatacgaagttattaggtccctcgacctgcagcccaagctagatcgaatttctagactcgagtggatccgccaccatgaatgaccagacccagtttacagaaagagccctgaccatcctgaccctggcacagaagctggcatccgaccaccagcacccacagctgcagcccatccacattctggccgctttcattgaaactcccgaggacgggagcgtgccttacctgcagaacctgatcgagaagggcaggtacgactacgacctgtttaagaaagtggtcaaccgaaatctggtgaggattcctcagcagcagccagcacctgcagagatcaccccaagctacgccctgggcaaggtgctgcaggacgcagccaaaatccagaagcagcagaaagacagcttcattgcacaggatcatatcctgttcgccctgtttaatgatagctccatccagcagattttcaaggaagcccaggtggacatcgaggctattaagcagcaggcactggagctgcgggggaacaccagaatcgactcccgcggcgctgataccaatacacccctggagtacctgtctaaatatgctattgatatgaccgaacaggcacggcagggcaagctggaccctgtcatcggaagagaggaagagattcgatcaacaatcagggtgctggccaggcggatcaaaagcaacccatgcctgattggagagcccgggatcggcaagacagctatcattgaaggggtggcacagcgcatcattgacgatgacgtgccaactatcctgcagggcgccaagctgttcagcctggatctggctgcactgaccgctggcgcaaaatacaagggagacttcgaagagaggtttaagggagtcctgaaagagattgaagagtccaagactctgatcgtgctgtttatcgatgagattcacatgctgatgggaaacgggaaagatgacgccgctaatatcctgaagcctgccctgagccgggggcagctgaaggtcattggcgctaccacaaacaatgaatacagatccatcgtcgagaaagacggcgccttcgaaagacgctttcagaagattgaagtggctgagccatccgtgagacagacagtcgcaatcctgcgcggcctgcagcccaagtatgagattcaccacggcgtgagaatcctggactctgcactggtcactgcagcccagctggccaagagatacctgccttatcgaaggctgccagacagcgccctggacctggtggatatctcctgtgctggagtggcagtggccagggacagtaaacctgaagagctggactcaaaggagcgacagctgcagctgattcaggtggaaatcaaggccctggaacgggatgaggacgctgatagtactaccaaggataggctgaaactggcccggcagaaagaggcttcactgcaggaagagctggaaccactgaggcagcggtacaacgaagagaagcacggacatgaagagctgacacaggccaagaaaaagctggacgagctggaaaacaaggccctggacgcagagcggagatacgatactgcaaccgctagcgacctgagatatttcgccatcccagatatcaagaagcagatcgaaaagctggaggaccaggtggcagaagaggaacgacgagcaggagccaactctatgattcagaatgtggtggactcagatacaatcagcgagactgccgctcggctgaccggcattcccgtgaaaaagctgtccgagtctgaaaacgagaagctgatccacatggagagggacctgagcagcgaagtggtcggccagatggacgccatcaaagccgtgagcaacgccgtcagactgagtcgctcaggcctggccaatccacgacagccagctagtttcctgtttctgggactgagcggctccggaaagacagagctggcaaaaaaggtggccgggttcctgtttaacgacgaggatatgatgatcagagtggattgctctgaactgagtgagaaatacgctgtcagtaagctgctgggcacaactgcaggatacgtggggtatgacgagggcggattcctgactaatcagctgcagtacaaaccttatagcgtgctgctgtttgatgaagtcgagaaggcccacccagacgtgctgaccgtcatgctgcagatgctggatgacggaaggattaccagcgggcagggcaagacaatcgactgctctaactgtatcgtgattatgacaagtaacctgggagccgagttcattaattcccagcaggggtctaaaatccaggaatctactaagaacctggtcatgggggctgtccggcagcatttcagacccgagtttctgaaccgcatctcaagcatcgtgattttcaataagctgagcaggaaagccatccacaagattgtggacatccgactgaaggagatcgaggaaaggttcgaacagaacgataagcattataaactgaatctgacccaggaggcaaaagactttctggccaagtacggatatagcgatgacatgggggcccgccctctgaaccgactgattcagaacgagatcctgaacaagctggccctgcgcattctgaagaacgaaatcaaagataaggagaccgtgaatgtggtcctgaaaaagggaaagtccagggacgagaacgtgcccgaggaagcagaggaatgtctggaggtcctgcctaatcacgaagctacaatcggggctgacactctgggagacgacgataacgaggatagtatggagattgacgatgacctggaccttaagtttaaaccgctgatcagcctcgactgtgccttctagttgccagccatctgttgtttgcccctcccccgtgccttccttgaccctggaaggtgccactcccactgtcctttcctaataaaatgaggaaattgcatcgcattgtctgagtaggtgtcattctattctggggggtggggtggggcaggacagcaagggggaggattgggaagacaatagcaggcatgctggggatgcggtgggctctataattcacagtgtcgcgagttagactatgtaagcagaattttaatcatttttaaagagcccagtacttcatatccatttctcccgctccttctgcagccttatcaaaaggtattttagaacactcattttagccccattttcatttattatactggcttatccaacccctagacagagcattggcattttccctttcctgatcttagaagtctgatgactcatgaaaccagacagattagttacatacaccacaaatcgaggctgtagctggggcctcaacactgcagttcttttataactccttagtacactttttgttgatcctttgccttgatccttaattttcagtgtctatcacctctcccgtcaggtggtgttccacatttgggcctattctcagtccagggagttttacaacaatagatgtattgagaatccaacctaaagcttaactttccactcccatgaatgcctctctcctttttctccatttataaactgagctattaaccattaatggtttccaggtggatgtctcctccccc

SEQ ID NO: 279 - DNA, 4345 bp, synthetic construct; identical to SEQ ID NO: 278
  source 1..4345: mol_type = other DNA

SEQ ID NO: 280 - DNA, 4165 bp, synthetic construct
  source 1..4165: mol_type = other DNA
cagccggagtgcgcagccgccggcagcctcgctctgcccactgggtggggcgggaggtaggtggggtgaggcgagctggacgtgcgggcgcggtcggcctctggcggggcgggggaggggagggagggtcagcgaaagtagctcgcgcgcgagcggccgcccaccctccccttcctctgggggagtcgttttacccgccgccggccgggcctcgtcgtctgattggctctcggggcccagaaaactggcccttgccattggctcgtgttcgtgcaagttgagtccatccgccggccagcgggggcggcgaggaggcgctcccaggttccggccctcccctcggccccgcgccgcagagtctggccgcgcgcccctgcgcaacgtggcaggaagcgcgcgctgggggcggggacgggcagtagggctgagcggctgcggggcgggtgcaagcacgtttccgacttgagttgcctcaagaggggcgtgctgagccagacctccatcgcgcactccggggagtggagggaaggagcgagggctcagttgggctgttttggaggcaggaagcacttgctctcccaaagtcgctctgagttgttatcagtaagggagctgcagtggagtaggcggggagaaggccgcacccttctccggaggggggaggggagtgttgcaatacctttctgggagttctctgctgcctcctggcttctgaggaccgccctgggcctgggagaatcccttccccctcttccctcgtgatctgcaactccagtctttctagaagatgggcgggagtcgacattgattattgactagttattaatagtaatcaattacggggtcattagttcatagcccatatatggagttccgcgttacataacttacggtaaatggcccgcctggctgaccgcccaacgacccccgcccattgacgtcaataatgacgtatgttcccatagtaacgccaatagggactttccattgacgtcaatgggtggagtatttacggtaaactgcccacttggcagtacatcaagtgtatcatatgccaagtacgccccctattgacgtcaatgacggtaaatggcccgcctggcattatgcccagtacatgaccttatgggactttcctacttggcagtacatctacgtattagtcatcgctattaccatggtcgaggtgagccccacgttctgcttcactctccccatctcccccccctccccacccccaattttgtatttatttattttttaattattttgtgcagcgatgggggcggggggggggggggggcgcgcgccaggcggggcggggcggggcgaggggcggggcggggcgaggcggagaggtgcggcggcagccaatcagagcggcgcgctccgaaagtttccttttatggcgaggcggcggcggcggcggccctataaaaagcgaagcgcgcggcgggcggggagtcgctgcgacgctgccttcgccccgtgccccgctccgccgccgcctcgcgccgcccgccccggctctgactgaccgcgttactcccacaggtgagcgggcgggacggcccttctcctccgggctgtaattagcgcttggtttaatgacggcttgtttcttttctgtggctgcgtgaaagccttgaggggctccgggagggccctttgtgcggggggagcggctcggggggtgcgtgcgtgtgtgtgtgcgtggggagcgccgcgtgcggctccgcgctgcccggcggctgtgagcgctgcgggcgcggcgcggggctttgtgcgctccgcagtgtgcgcgaggggagcgcggccgggggcggtgccccgcggtgcggggggggctgcgaggggaacaaaggctgcgtgcggggtgtgtgcgtgggggggtgagcagggggtgtgggcgcgtcggtcgggctgcaaccccccctgcacccccctccccgagttgctgagcacggcccggcttcgggtgcggggctccgtacggggcgtggcgcggggctcgccgtgccgggcggggggtggcggcaggtgggggtgccgggcggggcggggccgcctcgggccggggagggctcgggggaggggcgcggcggcccccggagcgccggcggctgtcgaggcgcggcgagccgcagccattgccttttatggtaatcgtgcgagagggcgcagggacttcctttgtcccaaatctgtgcggagccgaaatctgggaggcgccgccgcaccccctctagcgggcgcggggcgaagcggtgcggcgccggcaggaaggaaatgggcggggagggccttcgtgcgtcgccgcgccgccgtccccttctccctctccagcctcggggctgtccgcggggggacggctgccttcgggggggacggggcagggcggggttcggcttctggcgtgtgaccggcggctctagagcctctgctaaccatgttcatgccttcttctttttcctacagctcctgggcaacgtgctggttattgtgctgtctcatcattttggcaaagaattgaacctcttcgagggacctaataacttcgtatagcatacattatacgaagttatattaagggttccggatcgatccaccggtcgccaccatggtgagcaagggcgaggagctgttcaccggggtggtgcccatcctggtcgagctggacggcgacgtaaacggccacaagttcagcgtgtccggcgagggcgagggcgatgccacctacggcaagctgaccctgaagttcatctgcaccaccggcaagctgcccgtgccctggcccaccctcgtgaccaccctgacctacggcgtgcagtgcttcagccgctaccccgaccacatgaagcagcacgacttcttcaagtccgccatgcccgaaggctacgtccaggagcgcaccatcttcttcaaggacgacggcaactacaagacccgcgccgaggtgaagttcgagggcgacaccctggtgaaccgcatcgagctgaagggcatcgacttcaaggaggacggcaacatcctggggcacaagctggagtacaactacaacagccacaacgtctatatcatggccgacaagcagaagaacggcatcaaggtgaacttcaagatccgccacaacatcgaggacggcagcgtgcagctcgccgaccactaccagcagaacacccccatcggcgacggccccgtgctgctgcccgacaaccactacctgagcacccagtccgccctgagcaaagaccccaacgagaagcgcgatcacatggtcctgctggagttcgtgaccgccgccgggatcactctcggcatggacgagctgtacaagtaaagcggggccactagggacaggataggttctgggcaggcttaaaggctaacctggtgtgtgggcgttgtcctgcaggggaattgaacaggtgtaaaattggagggacaagacttcccacagattttcggttttgtcgggaagttttttaataggggcaaataaggaaaatgggaggataggtagtcatctggggttttatgcagcaaaactacaggttattattgcttgtgatccgcctcggagtattttccatcgaggtagattaaagacatgctcacccgagttttatactctcctgcttgagatccttactacagtatgaaattacagtgtcgcgagttagactatgtaagcagaattttaatcatttttaaagagcccagtacttcatatccatttctcccgctccttctgcagccttatcaaaaggtattttagaacactcattttagccccattttcatttattatactggcttatccaacccctagacagagcattggcattttccctttcctgatcttagaagtctgatgactcatgaaaccagacagattagttacatacaccacaaatcgaggctgtagctggggcctcaacactgcagttcttttataactccttagtacactttttgttgatcctttgccttgatccttaattttcagtgtctatcacctctcccgtcaggtggtgttccacatttgggcctattctcagtccagggagttttacaacaatagatgtattgagaatccaacctaaagcttaactttccactcccatgaatgcctctctcctttttctccatttataaactgagc

SEQ ID NO: 281 - DNA, 4503 bp, synthetic construct; identical to SEQ ID NO: 272
  source 1..4503: mol_type = other DNA

SEQ ID NO: 282 - DNA, 4503 bp, synthetic construct; identical to SEQ ID NO: 272
  source 1..4503: mol_type = other DNA

SEQ ID NO: 283 - DNA, 4503 bp, synthetic construct; identical to SEQ ID NO: 272
  source 1..4503: mol_type = other DNA

SEQ ID NO: 284 - DNA, 3394 bp, synthetic construct
  source 1..3394: mol_type = other DNA
ggagtcgttttacccgccgccggccgggcctcgtcgtctgattggctctcggggcccagaaaactggcccttgccattggctcgtgttcgtgcaagttgagtccatccgccggccagcgggggcggcgaggaggcgctcccaggttccggccctcccctcggccccgcgccgcagagtctggccgcgcgcccctgcgcaacgtggcaggaagcgcgcgctgggggcggggacgggcagtagggctgagcggctgcggggcgggtgcaagcacgtttccgacttgagttgcctcaagaggggcgtgctgagccagacctccatcgcgcactccggggagtggagggaaggagcgagggctcagttgggctgttttggaggcaggaagcacttgctctcccaaagtcgctctgagttgttatcagtaagggagctgcagtggagtaggcggggagaaggccgcacccttctccggaggggggaggggagtgttgcaatacctttctgggagttctctgctgcctcctggcttctgaggaccgccctgggcctgggagaatcccttccccctcttccctcgtgatctgcaactccagtctttctagaagatgggcgggagtcgacattgattattgactagttattaatagtaatcaattacggggtcattagttcatagcccatatatggagttccgcgttacataacttacggtaaatggcccgcctggctgaccgcccaacgacccccgcccattgacgtcaataatgacgtatgttcccatagtaacgccaatagggactttccattgacgtcaatgggtggagtatttacggtaaactgcccacttggcagtacatcaagtgtatcatatgccaagtacgccccctattgacgtcaatgacggtaaatggcccgcctggcattatgcccagtacatgaccttatgggactttcctacttggcagtacatctacgtattagtcatcgctattaccatggtcgaggtgagccccacgttctgcttcactctccccatctcccccccctccccacccccaattttgtatttatttattttttaattattttgtgcagcgatgggggcggggggggggggggggcgcgcgccaggcggggcggggcggggcgaggggcggggcggggcgaggcggagaggtgcggcggcagccaatcagagcggcgcgctccgaaagtttccttttatggcgaggcggcggcggcggcggccctataaaaagcgaagcgcgcggcgggcggggagtcgctgcgacgctgccttcgccccgtgccccgctccgccgccgcctcgcgccgcccgccccggctctgactgaccgcgttactcccacaggtgagcgggcgggacggcccttctcctccgggctgtaattagcgcttggtttaatgacggcttgtttcttttctgtggctgcgtgaaagccttgaggggctccgggagggccctttgtgcggggggagcggctcggggggtgcgtgcgtgtgtgtgtgcgtggggagcgccgcgtgcggctccgcgctgcccggcggctgtgagcgctgcgggcgcggcgcggggctttgtgcgctccgcagtgtgcgcgaggggagcgcggccgggggcggtgccccgcggtgcggggggggctgcgaggggaacaaaggctgcgtgcggggtgtgtgcgtgggggggtgagcagggggtgtgggcgcgtcggtcgggctgcaaccccccctgcacccccctccccgagttgctgagcacggcccggcttcgggtgcggggctccgtacggggcgtggcgcggggctcgccgtgccgggcggggggtggcggcaggtgggggtgccgggcggggcggggccgcctcgggccggggagggctcgggggaggggcgcggcggcccccggagcgccggcggctgtcgaggcgcggcgagccgcagccattgccttttatggtaatcgtgcgagagggcgcagggacttcctttgtcccaaatctgtgcggagccgaaatctgggaggcgccgccgcaccccctctagcgggcgcggggcgaagcggtgcggcgccggcaggaaggaaatgggcggggagggccttcgtgcgtcgccgcgccgccgtccccttctccctctccagcctcggggctgtccgcggggggacggctgccttcgggggggacggggcagggcggggttcggcttctggcgtgtgaccggcggctctagagcctctgctaaccatgttcatgccttcttctttttcctacagctcctgggcaacgtgctggttattgtgctgtctcatcattttggcaaagaatggggccactagggacaggataggctgtgccttctagttgccagccatctgttgtttgcccctcccccgtgccttccttgaccctggaaggtgccactcccactgtcctttcctaataaaatgaggaaattgcatcgcattgtctgagtaggtgtcattctattctggggggtggggtggggcaggacagcaagggggaggattgggaagacaatagcaggcatgctggggatgcggtgggctctatttctgggcaggcttaaaggctaacctggtgtgtgggcgttgtcctgcaggggaattgaacaggtgtaaaattggagggacaagacttcccacagattttcggttttgtcgggaagttttttaataggggcaaataaggaaaatgggaggataggtagtcatctggggttttatgcagcaaaactacaggttattattgcttgtgatccgcctcggagtattttccatcgaggtagattaaagacatgctcacccgagttttatactctcctgcttgagatccttactacagtatgaaattacagtgtcgcgagttagactatgtaagcagaattttaatcatttttaaagagcccagtacttcatatccatttctcccgctccttctgcagccttatcaaaaggtattttagaacactcattttagccccattttcatttattatactggcttatccaacccctagacagagcattggcattttccctttcctgatcttagaagtctgatgactcatgaaaccagacagattagttacatacaccacaaatcgaggctgtagctggggcctcaacactgcagttcttttataactccttagtacactttttgttgatcctttgccttgatccttaattttcagtgtctatcacctctcccgtcaggtggtgttccacatttgggcctattctcagtccagggagttttacaacaatagatgtattgagaatccaacctaaagcttaactttccactcccatgaatgcctctctcctttttctccatttataaactgagc

SEQ ID NO: 285 - DNA, 4503 bp, synthetic construct; identical to SEQ ID NO: 272
  source 1..4503: mol_type = other DNA

SEQ ID NO: 286 - DNA, 4390 bp, synthetic construct
  source 1..4390: mol_type = other DNA
cccactggtcaggaaaggaacactagtgcacttatcctgggtgtctgctgagccaacagtggtagtaaggtaagggcaggatgtgtcaaactgccaatagagaactacttactcttcaggctgaagctgatggaacaggtaacaaaggcaaacactaatcatgatcagcaagatgaagcagaaagggaacaaggggatattaaatgtgtatagacacgctagagagatggctcagcagttaagagaactagctggtctttcagaggtcctgagatcaattttagacacccacatggtggctcatgaccatctatctataaatggatctgattttcatgtctggcagtgtacagaagctaactgaagaaaggtggaagacccacaagagttcaagataagccctatatagtgaagttcaaggcaagctttttctacctgaaacttagtctcaaaaaaaaatgaatacgtaaacagtcttccaggggataagaaccttacagaaaaagcagaaatgcctggggcactggattaccgatgtaatcaaattcagtccttgaattgaacacaggattgcctagagcaaggccagccagagattcatctcagagggagaaaggtgtctttggagcaattttgtggtaatctagtatgtatcacataagtttagacgcatttgggactggaaagatgtgaacaaagcaccgagctcacggggacagcccccccccaaagcccccagggatgtaattacgtccctcccccgctagggggcagcagcgagccgcccggggctccgctccggtccggcgctccccccgcatccccgagccggcagcgtgcggggacagcccgggcacggggaaggtggcacgggatcgctttcctctgaacgcttctcgctgctctttgagcctgcagacacctggggggatacggggaaaaagttttaggctgaaagagagatttagaatgacagaatcatagaacggcctgggttgcaaaggagcacagtgctcatccagatccaaccccctgctatgtgcagggtcatcaaccagcagcccaggctgcccagagccacatccagcctggccttgaatgcctgcagggatggggcatccacagcctccttgggcaacctgttcagtgcgtcaccaccctctgggggaaaaactgcctcctcatatccaacccaaacctcccctgtctcagtgtaaagccattcccccttgtcctatcaagggggagtttgctgtgacattgttggtctggggtgacacatgtttgccaattcagtgcatcacggagaggcagatcttggggataaggaagtgcaggacagcatggacgtgggacatgcaggtgttgagggctctgggacactctccaagtcacagcgttcagaacagccttaaggataagaagataggatagaaggacaaagagcaagttaaaacccagcatggagaggagcacaaaaaggccacagacactgctggtccctgtgtctgagcctgcatgtttgatggtgtctggatgcaagcagaaggggtggaagagcttgcctggagagatacagctgggtcagtaggactgggacaggcagctggagaattgccatgtagatgttcatacaatcgtcaaatcatgaaggctggaaaagccctccaagatccccaagaccaaccccaacccacccaccgtgcccactggccatgtccctcagtgccacatccccacagttcttcatcacctccagggacggtgacccccccacctccgtgggcagctgtgccactgcagcaccgctctttggagaaggtaaatcttgctaaatccagcccgaccctcccctggcacaacgtaaggccattatctctcatccaactccaggacggagtcagtgagaatattggcaagctagccgggaggtggtccctgcagttacgccaatgataacccccgccagaaaaatcttagtagccttccctttttgttttccgtgccccaactcggcggattgactcggccccttccggaaacacccgaatcaacttctagtcaaattattgttcacgccgcaatgacccacccctggcccgcgtctgtggaactgacccctggtgtacaggagagttcgctgctgaaagtggtcccaaaggggtactagtttttaagctcccaactccccctcccccagcgtctggaggattccacaccctcgcaccgcaggggcgaggaagtgggcggagtccggttttggcgccagccgctgaggctgccaagcagaaaagccaccgctgaggagactccggtcactgtcctcgccccgcctcccccttccctccccttggggaccaccgggcgccacgccgcgaacggtaagtgccgcggtcgtcggcgcctccgccctccccctagggccccaattcccagcgggcgcggcgcgcggcccctccccccgccgggcgcgcgcccgctgccccgcccttcgtggccgcccggcgtgggcggtgccacccctccccccggcggccccgcgcgcagctcccggctccctcccccttcggatgtggcttgagctgtaggcgcggagacccccgcccattgacgtcaataatgacgtatgttcccatagtaacgccaatagggactttccattgacgtcaatgggtggagtatttacggtaaactgcccacttggcagtacatcaagtgtatcatatgccaagtacgccccctattgacgtcaatgacggtaaatggcccgcctggcattatgcccagtacatgaccttatgggactttcctacttggcagtacatctacgtattagtcatcgctattaccatggtcgaggtgagccccacgttctgcttcactctccccatctcccccccctccccacccccaattttgtatttatttattttttaattattttgtgcagcgatgggggcggggggggggggggggcgcgcgccaggcggggcggggcggggcgaggggcggggcggggcgaggcggagaggtgcggcggcagccaatcagagcggcgcgctccgaaagtttccttttatggcgaggcggcggcggcggcggccctataaaaagcgaagcgcgcggcgggcgggagtcgctgcgcgctgccttcgccccgtgccccgctccgccgccgcctcgcgccgcccgccccggctctgactgaccgcgttactcccacaggtgagcgggcgggacggcccttctcctccgggctgtaattagcgcttggtttaatgacggcttgtttcttttctgtggctgcgtgaaagccttgaggggctccgggagggccctttgtgcggggggagcggctcggggggtgcgtgcgtgtgtgtgtgcgtggggagcgccgcgtgcggctccgcgctgcccggcggctgtgagcgctgcgggcgcggcgcggggctttgtgcgctccgcagtgtgcgcgaggggagcgcggccgggggcggtgccccgcggtgcggggggggctgcgaggggaacaaaggctgcgtgcggggtgtgtgcgtgggggggtgagcagggggtgtgggcgcgtcggtcgggctgcaaccccccctgcacccccctccccgagttgctgagcacggcccggcttcgggtgcggggctccgtacggggcgtggcgcggggctcgccgtgccgggcggggggtggcggcaggtgggggtgccgggcggggcggggccgcctcgggaaggcacagtcgaggctgctggctatggctcacatctgtcattaactctagttccagtgcacctgacaccgtcttctggcctctgcagtgaccaagcacatgggtagtatgtagacatatacataagcaaaacacacatcattaaaaagtgacatttcccaaaggaagctgaagaaccagttcttgagaagatagtagaaatcagaaggggaaatagtagacatacagagggactgaccaggttgtgtcacctttataggctaggctaatggatgatcgacactagcgctctttgtgaaggacacacaaatgagacatagtttataggactaaacacacttctaagcaatttaatgagacttaagaccctgtctctagcaaatactctggatgatattcagctcaaggctcttgtcagacatgtttccattttcaaggtgagctaactggccaaaactgccaacaacctgtagtgaatagagaagatgagaaaatctggattctcaaatgacctaatgaaagccactggagcgccatatggtttctgtgaaaatgccttttcaatcattaacctcttaaatgagtgttagcatcctaactaatgagtggtgcagaatagtgggtctgcttagcttaactaaggcc

SEQ ID NO: 287 - DNA, 4503 bp, synthetic construct; identical to SEQ ID NO: 272
  source 1..4503: mol_type = other DNA

SEQ ID NO: 288 - DNA, 4503 bp, synthetic construct; identical to SEQ ID NO: 272
  source 1..4503: mol_type = other DNA

SEQ ID NO: 289 - DNA, 4503 bp, synthetic construct; identical to SEQ ID NO: 272
  source 1..4503: mol_type = other DNA

SEQ ID NO: 290 - DNA, 3806 bp, synthetic construct
  source 1..3806: mol_type = other DNA
gagcacttccttctcggcgctgcaccacgtgatgtcctctgagcggatcctccccgtgtctgggtcctctccgggcatctctcctccctcacccaaccccatgccgtcttcactcgctgggttcccttttccttctccttctggggcctgtgccatctctcgtttcttaggatggccttctccgacggatgtctcccttgcgtcccgcctccccttcttgtaggcctgcatcatcaccgtttttctggacaaccccaaagtaccccgtctccctggctttagccacctctccatcctcttgctttctttgcctggacaccccgttctcctgtggattcgggtcacctctcactcctttcatttgggcagctcccctaccccccttacctctctagtctgtgctagctcttccagccccctgtcatggcatcttccaggggtccgagagctcagctagtcttcttcctccaacccgggcccctatgtccacttcaggacagcatgtttgctgcctccagggatcctgtgtccccgagctgggaccaccttatattcccagggccggttaatgtggctctggttctgggtacttttatctgtcccctccaccccacagttaacaattggggttggggttgcgccttttccaaggcagccctgggtttgcgcagggacgcggctgctctgggcgtggttccgggaaacgcagcggcgccgaccctgggtctcgcacattcttcacgtccgttcgcagcgtcacccggatcttcgccgctacccttgtgggccccccggcgacgcttcctgctccgcccctaagtcgggaaggttccttgcggttcgcggcgtgccggacgtgacaaacggaagccgcacgtctcactagtaccctcgcagacggacagcgccagggagcaatggcagcgcgccgaccgcgatgggctgtggccaatagcggctgctcagcagggcgcgccgagagcagcggccgggaaggggcggtgcgggaggcggggtgtggggcggtagtgtgggccctgttcctgcccgcgcggtgttccgcattctgcaagcctccggagcgcacgtcggcagtcggctccctcgttgaccgaatcaccgacctctctccccagggggatccaccggtcgccaccatgtccctaaggggcagcctctcgcgtctcctccagacgcgagtgcattccatcctgaagaaatccgtccactccgtggctgtgataggagccccgttctcacaagggcagaaaagaaaaggagtggagcatggtcccgctgccataagagaagctggcttgatgaaaaggctctccagtttgggctgccacctaaaagactttggagatttgagttttactccagtccccaaagatgatctctacaacaacctgatagtgaatccacgctcagtgggtcttgccaaccaggaactggctgaggtggttagcagagctgtgtcagatggctacagctgtgtcacactgggaggagaccacagcctggcaatcggtaccattagtggccatgcccgacactgcccagacctttgtgttgtctgggttgatgcccatgctgacatcaacacaccccttaccacttcatcaggaaatctccatggacagccagtttcatttctcctcagagaactacaggataaggtaccacaactcccaggattttcctggatcaaaccttgtatctcttctgcaagtattgtgtatattggtctgagagacgtggaccctcctgaacattttattttaaagaactatgatatccagtatttttccatgagagatattgatcgacttggtatccagaaggtcatggaacgaacatttgatctgctgattggcaagagacaaagaccaatccatttgagttttgatattgatgcatttgaccctacactggctccagccacaggaactcctgttgtcgggggactaacctatcgagaaggcatgtatattgctgaggaaatacacaatacagggttgctatcagcactggatcttgttgaagtcaatcctcagttggccacctcagaggaagaggcgaagactacagctaacctggcagtagatgtgattgcttcaagctttggtcagacaagagaaggagggcatattgtctatgaccaacttcctactcccagttcaccagatgaatcagaaaatcaagcacgtgtgagaattggtggctctggaggtgtgagcaagggcgaggagctgttcaccggggtggtgcccatcctggtcgagctggacggcgacgtaaacggccacaagttcagcgtgtccggcgagggcgagggcgatgccacctacggcaagctgaccctgaagttcatctgcaccaccggcaagctgcccgtgccctggcccaccctcgtgaccaccctgacctacggcgtgcagtgcttcagccgctaccccgaccacatgaagcagcacgacttcttcaagtccgccatgcccgaaggctacgtccaggagcgcaccatcttcttcaaggacgacggcaactacaagacccgcgccgaggtgaagttcgagggcgacaccctggtgaaccgcatcgagctgaagggcatcgacttcaaggaggacggcaacatcctggggcacaagctggagtacaactacaacagccacaacgtctatatcatggccgacaagcagaagaacggcatcaaggtgaacttcaagatccgccacaacatcgaggacggcagcgtgcagctcgccgaccactaccagcagaacacccccatcggcgacggccccgtgctgctgcccgacaaccactacctgagcacccagtccgccctgagcaaagaccccaacgagaagcgcgatcacatggtcctgctggagttcgtgaccgccgccgggatcactctcggcatggacgagctgtacaagtaatagaagaaatgaatatcagagagtgagaggaacttgtttattgcagcttataatggttacaaataaagcaatagcatcacaaatttcacaaataaagcatttttttcactgcattctagttgtggtttgtccaaactcatcaatgtatcttagcggccgcatcgatacagaaaagccccatccttaggcctcctccttcctagtctcctgatattgggtctaacccccacctcctgttaggcagattccttatctggtgacacacccccatttcctggagccatctctctccttgccagaacctctaaggtttgcttacgatggagccagagaggatcctgggagggagagcttggcagggggtgggagggaagggggggatgcgtgacctgcccggttctcagtggccaccctgcgctaccctctcccagaacctgagctgctctgacgcggccgtctggtgcgtttcactgatcctggtgctgcagcttccttacacttcccaagaggagaagcagtttggaaaaacaaaatcagaataagttggtcctgagttctaactttggctcttcacctttctagtccccaatttatattgttcctccgtgcgtcagttttacctgtgagataaggccagtagccagccccgtcctggcagggctgtggtgaggaggggggtgtccgtgtggaaaactccctttgtgagaatggtgcgtcctaggtgttcaccaggtcgtggccgcctctactccctttctctttctccatccttctttccttaaagagtccccagtgctatctgggacatattcctccgcccagagcagggtcccgcttccctaaggccctgctctg

SEQ ID NO: 291 - DNA, 160 bp, synthetic construct
  source 1..160: mol_type = other DNA
cttccatttaaaggaatgaacttgcatcagttcattttacaaagacagcacaagcctaatggatccataacttcgtataatgtatgctatacgaagttatacaaggccgcacaggacaaaaaaataaaagaaaaacaaacttacaaaatgtttgaatcag

SEQ ID NO: 292 - DNA, 120 bp, synthetic construct
  source 1..120: mol_type = other DNA
gcctctcttgtcccggcagggtggacccatgggagtgctatcaggacacctggcagacaatgtgcagtgtgttggagcaccatcgagacctgatgaaggtaagatgggctgtggctgagg

SEQ ID NO: 293 - DNA, 160 bp, synthetic construct
  source 1..160: mol_type = other DNA
cactcagtgaccactctgtatcagcaccagccatacaaagaagacggggctgtccctgggataacttcgtatagcatacattatacgaagttatggatcccggtcatggagcttctctatctgggcccactgttcactggcacacgctcacccttcacag

SEQ ID NO: 294 - DNA, 135 bp, synthetic construct
  source 1..135: mol_type = other DNA
cgcctcctgcatgatgcgcggcccaaggagggagatgatcgccccttcttctggctctttgccaatgtggtcgctatgggcgttagtgacaagagggacatctcgcgatttcttgaggtatagaccgagaccttg

SEQ ID NO: 295 - DNA, 4244 bp, synthetic construct
  source 1..4244: mol_type = other DNA
ccgtccccttctccctctccagcctcggggctgtccgcggggggacggctgccttcgggggggacggggcagggcggggttcggcttctggcgtgtgaccggcggctctagagcctctgctaaccatgttcatgccttcttctttttcctacagctcctgggcaacgtgctggttattgtgctgtctcatcattttggcaaagaattgatttgataccgcgggcccataacttcgtataatgtatgctatacgaagttattcgcgatgaataaatgaaagcttgcagatctgcgactctagaggatctgcgactctagaggatcataatcagccataccacatttgtagaggttttacttgctttaaaaaacctcccacacctccccctgaacctgaaacataaaatgaatgcaattgttgttgttaacttgtttattgcagcttataatggttacaaataaagcaatagcatcacaaatttcacaaataaagcatttttttcactgcattctagttgtggtttgtccaaactcatcaatgtatcttatcatgtctggatctgcgactctagaggatcataatcagccataccacatttgtagagggaagatgggcgggagtcttttacttgctttaaaaaacctcccacacctccccctgaacctgaaacataaaatgaatgcaattgttgttgttaacttgtttattgcagcttataatggttacaaataaagcaatagcatcacaaatttcacaaataaagcatttttttcactgcattctagttgtggtttgtccaaactcatcaatgtatcttatcatgtctggatctgcgactctagaggatcataatcagccataccacatttgtagaggttttacttgctttaaaaaacctcccacacctccccctgaacctgaaacataaaatgaatgcaattgttgttgttaacttgtttattgcagcttataatggttacaaataaagcaatagcatcacaaatttcacaaataaagcatttttttcactgcattctagttgtggtttgtccaaactcatcaatgtatcttatcatgtctggatccccatcaagctgatccggaacccttaatataacttcgtataatgtatgctatacgaagttattaggtccctcgacctgcagcccaagctagatcgaattcggccggccgatatcggcgcgccgccaccatgtcaagctcttcctggctccttctcagccttgttgctgtaactgctgctcagtccaccattgaggaacaggccaagacatttttggacaagtttaaccacgaagccgaagacctgttctatcaaagttcacttgcttcttggaattataacaccaatattactgaagagaatgtccaaaacatgaataatgctggggacaaatggtctgcctttttaaaggaacagtccacacttgcccaaatgtatccactacaagaaattcagaatctcacagtcaagcttcagctgcaggctcttcagcaaaatgggtcttcagtgctctcagaagacaagagcaaacggttgaacacaattctaaatacaatgagcaccatctacagtactggaaaagtttgtaacccagataatccacaagaatgcttattacttgaaccaggtttgaatgaaataatggcaaacagtttagactacaatgagaggctctgggcttgggaaagctggagatctgaggtcggcaagcagctgaggccattatatgaagagtatgtggtcttgaaaaatgagatggcaagagcaaatcattatgaggactatggggattattggagaggagactatgaagtaaatggggtagatggctatgactacagccgcggccagttgattgaagatgtggaacatacctttgaagagattaaaccattatatgaacatcttcatgcctatgtgagggcaaagttgatgaatgcctatccttcctatatcagtccaattggatgcctccctgctcatttgcttggtgatatgtggggtagattttggacaaatctgtactctttgacagttccctttggacagaaaccaaacatagatgttactgatgcaatggtggaccaggcctgggatgcacagagaatattcaaggaggccgagaagttctttgtatctgttggtcttcctaatatgactcaaggattctgggaaaattccatgctaacggacccaggaaatgttcagaaagcagtctgccatcccacagcttgggacctggggaagggcgacttcaggatccttatgtgcacaaaggtgacaatggacgacttcctgacagctcatcatgagatggggcatatccagtatgatatggcatatgctgcacaaccttttctgctaagaaatggagctaatgaaggattccatgaagctgttggggaaatcatgtcactttctgcagccacacctaagcatttaaaatccattggtcttctgtcacccgattttcaagaagacaatgaaacagaaataaacttcctgctcaaacaagcactcacgattgttgggactctgccatttacttacatgttagagaagtggaggtggatggtctttaaaggggaaattcccaaagaccagtggatgaaaaagtggtgggagatgaagcgagagatagttggggtggtggaacctgtgccccatgatgaaacatactgtgaccccgcatctctgttccatgtttctaatgattactcattcattcgatattacacaaggaccctttaccaattccagtttcaagaagcactttgtcaagcagctaaacatgaaggccctctgcacaaatgtgacatctcaaactctacagaagctggacagaaactgttcaatatgctgaggcttggaaaatcagaaccctggaccctagcattggaaaatgttgtaggagcaaagaacatgaatgtaaggccactgctcaactactttgagcccttatttacctggctgaaagaccagaacaagaattcttttgtgggatggagtaccgactggagtccatatgcagaccaaagcatcaaagtgaggataagcctaaaatcagctcttggagataaagcatatgaatggaacgacaatgaaatgtacctgttccgatcatctgttgcatatgctatgaggcagtactttttaaaagtaaaaaatcagatgattctttttggggaggaggatgtgcgagtggctaatttgaaaccaagaatctcctttaatttctttgtcactgcacctaaaaatgtgtctgatatcattcctagaactgaagttgaaaaggccatcaggatgtcccggagccgtatcaatgatgctttccgtctgaatgacaacagcctagagtttctggggatacagccaacacttggacctcctaaccagccccctgtttccatatggctgattgtttttggagttgtgatgggagtgatagtggttggcattgtcatcctgatcttcactgggatcagagatcggaagaagaaaaataaagcaagaagtggagaaaatccttatgcctccatcgatattagcaaaggagaaaataatccaggattccaaaacactgatgatgttcagacctccttttaggtttaaacccgcttctggtgatcagcctcgactgtgccttctagttgccagccatctgttgtttgcccctcccccgtgccttccttgaccctggaaggtgccactcccactgtcctttcctaataaaatgaggaaattgcatcgcattgtctgagtaggtgtcattctattctggggggtggggtggggcaggacagcaagggggaggattgggaagacaatggcaggcatgctggggatgcggtgggctctatggtctgggcattctgggcaggcttaaaggctaacctggtgtgtgggcgttgtcctgcaggggaattgaacaggtgtaaaattggagggacaagacttcccacagattttcggttttgtcgggaagttttttaataggggcaaataaggaaaatgggaggataggtagtcatctggggttttatgcagcaaaactacaggttattattgcttgtgatccgcctcggagtattttccatcgaggtagattaaagacatgctcacccgagttttatactctcctgcttgagatccttactacagtatgaaattacagtgtcgcgagttagactatgtaagcagaattttaatcatttttaa

SEQ ID NO: 296 - DNA, 2835 bp, synthetic construct
  source 1..2835: mol_type = other DNA
aatttactgaccgtacaccaaaatttgcctgcattaccggtcgatgcaacgagtgatgaggttcgcaagaacctgatggacatgttcagggatcgccaggcgttttctgagcatacctggaaaatgcttctgtccgtttgccggtcgtgggcggcatggtgcaagttgaataaccggaaatggtttcccgcagaacctgaagatgttcgcgattatcttctatatcttcaggcgcgcggtctggcagtaaaaactatccagcaacatttgggccagctaaacatgcttcatcgtcggtccgggctgccacgaccaagtgacagcaatgctgtttcactggttatgcggcggatccgaaaagaaaacgttgatgccggtgaacgtgcaaaacaggctctagcgttcgaacgcactgatttcgaccaggttcgttcactcatggaaaatagcgatcgctgccaggatatacgtaatctggcatttctggggattgcttataacaccctgttacgtatagccgaaattgccaggatcagggttaaagatatctcacgtactgacggtgggagaatgttaatccatattggcagaacgaaaacgctggttagcaccgcaggtgtagagaaggcacttagcctgggggtaactaaactggtcgagcgatggatttccgtctctggtgtagctgatgatccgaataactacctgttttgccgggtcagaaaaaatggtgttgccgcgccatctgccaccagccagctatcaactcgcgccctggaagggatttttgaagcaactcatcgattgatttacggcgctaaggatgactctggtcagagatacctggcctggtctggacacagtgcccgtgtcggagccgcgcgagatatggcccgcgctggagtttcaataccggagatcatgcaagctggtggctggaccaatgtaaatattgtcatgaactatatccgtaacctggatagtgaaacaggggcaatggtgcgcctgctggaagatggcgatctcgagccatctgctggagacatgagagctgccaacctttggccaagcccgctcatgatcaaacgctctaagaagaacagcctggccttgtccctgacggccgaccagatggtcagtgccttgttggatgctgagccccccatactctattccgagtatgatcctaccagacccttcagtgaagcttcgatgatgggcttactgaccaacctggcagacagggagctggttcacatgatcaactgggcgaagagggtgccaggctttgtggatttgaccctccatgatcaggtccaccttctagaatgtgcctggctagagatcctgatgattggtctcgtctggcgctccatggagcacccagtgaagctactgtttgctcctaacttgctcttggacaggaaccagggaaaatgtgtagagggcatggtggagatcttcgacatgctgctggctacatcatctcggttccgcatgatgaatctgcagggagaggagtttgtgtgcctcaaatctattattttgcttaattctggagtgtacacatttctgtccagcaccctgaagtctctggaagagaaggaccatatccaccgagtcctggacaagatcacagacactttgatccacctgatggccaaggcaggcctgaccctgcagcagcagcaccagcggctggcccagctcctcctcatcctctcccacatcaggcacatgagtaacaaaggcatggagcatctgtacagcatgaagtgcaagaacgtggtgcccctctatgacctgctgctggaggcggcggacgcccaccgcctacatgcgcccactagccgtggaggggcatccgtggaggagacggaccaaagccacttggccactgcgggctctacttcatcgcattccttgcaaaagtattacatcacgggggaggcagagggtttccctgccacaggaagcggagctactaacttcagcctgctgaagcaggctggagacgtggaggagaaccctggacctatggacacttgtcacattgcaaagtcctgtgtgctcatccttcttgtggtcctactgtgtgcagaaagaggtgagatgaaaaatgggagaggggcaggagggtacaatggagatagaaaagggcctcagggttgtgggtacacctgcacctccattgtgtgcgtggtgactgaggtgtcctggagcaaggggatcaggaattggcttgtgatggtgaagcctcctatgctgagtgctgggtctgtaaccctgccagcgaaaccatcatcacataccagaaagtctcttggacctcactacctgtgccccaaccctagccaccagaacccttagattctacactgctgcactggcttcccagtcaggccactggcctgtgtgcactcaaactggcagagtcttcttttccttcccacctgccaagtcacggggctaggaatccttaactctaggcatttgactttttgttacgtcatgtgagacctgaatgctagaacttgcttactctaagaggtttgagctctcagatacccctagacttctagttacatctgtgttgtgggaagcctcatggtgagcctctttgagttggactctgggaagttcagtgctctgtcatgcgtcatttcccaggggccagctctgaagttgtaggtttgaataggtcagaacaaccctccccacttggttgccccagtacctgcttatacacccactcacctattcagcagacatttagtatgtgcatcttcccaatatgctgactgtctctctggtacatcttggagtccaggactc

SEQ ID NO: 297 - DNA, 3254 bp, synthetic construct
  source 1..3254: mol_type = other DNA
aacctcccacacctccccctgaacctgaaacataaaatgaatgcaattgttgttgttaacttgtttattgcagcttataatggttacaaataaagcaatagcatcacaaatttcacaaataaagcatttttttcactgcattctagttgtggtttgtccaaactcatcaatgtatcttatcatgtctggatctgcgactctagaggatcataatcagccataccacatttgtagaggttttacttgctttaaaaaacctcccacacctccccctgaacctgaaacataaaatgaatgcaattgttgttgttaacttgtttattgcagcttataatggttacaaataaagcaatagcatcacaaatttcacaaataaagcatttttttcactgcattctagttgtggtttgtccaaactcatcaatgtatcttatcatgtctggatctgcgactctagaggatcataatcagccataccacatttgtagaggttttacttgctttaaaaaacctcccacacctccccctgaacctgaaacataaaatgaatgcaattgttgttgttaacttgtttattgcagcttataatggttacaaataaagcaatagcatcacaaatttcacaaataaagcatttttttcactgcattctagttgtggtttgtccaaactcatcaatgtatcttatcatgtctggatccccatcaagctgatccggaacccttaatataacttcgtataatgtatgctatacgaagttattaggtccctcgacctgcagcccaagctagatcgaatttctagactcgagtggatccgccaccatggcaacccttaaggagaagctcattgcgtccgttgcagatgatgaggctgccgtcccgaacaacaagatcactgtagtgggcgttggacaagtgggtatggcatgtgccatcagcattctgggaaagtctctggctgatgaacttgccctggtggatgtgttggaagacaagctcaaaggagagatgatggacctgcagcacgggagcttgttcctccagactccgaaaattgtggccgataaagattactctgtgacagccaactctaagattgtggtggtgacggcaggagtccgccagcaggagggggagagtcggctcaacctggtgcagagaaatgtcaacgtgttcaagttcatcattcctcagatcgtcaagtacagccctgactgcaccatcatcgtggtttccaacccagtggatattctgacttacgtcacctggaaactgagcgggctacctaagcaccgtgtgattggaagcggatgcaatctggattctgctcgattccgctacctcatggcagagaagcttggcattcatcccagcagctgccacggatggatcctgggcgagcatggagactccagtgtggctgtgtggagcggggtgaatgtggcaggagtctccctccaggaactgaatccagaaatggggacagacaatgacagtgagaactggaaggaggtgcataagatggtggtggacagtgcctatgaagtcatcaagctcaaaggctacaccaactgggccatcggcctgagcgtggctgacctcatcgagtccatgctgaaaaacctctcccggattcaccccgtgtctaccatggtgaagggaatgtacggcattgagaatgaagtcttcctcagtctcccgtgcatcctcaatgctcgggggctgaccagcgtcatcaatcagaagctgaaggacgatgaggtcgctcagctcaggaagagtgcggacaccctgtgggacatccagaaagacctcaaagacctgggcggtagtggaggagactacaaagaccatgacggtgattataaagatcatgacatcgattacaaggatgacgatgacaagtaagaattccaccacactggactagtggatccgagctcggtaccaagcttaagtttaaaccgctgatcagcctcgactgtgccttctagttgccagccatctgttgtttgcccctcccccgtgccttccttgaccctggaaggtgccactcccactgtcctttcctaataaaatgaggaaattgcatcgcattgtctgagtaggtgtcattctattctggggggtggggtggggcaggacagcaagggggaggattgggaagacaatagcaggcatgctggggatgcggtgggctctataattcacagtgtcgcgagttagactatgtaagcagaattttaatcatttttaaagagcccagtacttcatatccatttctcccgctccttctgcagccttatcaaaaggtattttagaacactcattttagccccattttcatttattatactggcttatccaacccctagacagagcattggcattttccctttcctgatcttagaagtctgatgactcatgaaaccagacagattagttacatacaccacaaatcgaggctgtagctggggcctcaacactgcagttcttttataactccttagtacactttttgttgatcctttgccttgatccttaattttcagtgtctatcacctctcccgtcaggtggtgttccacatttgggcctattctcagtccagggagttttacaacaatagatgtattgagaatccaacctaaagcttaactttccactcccatgaatgcctctctcctttttctccatttataaactgagctattaaccattaatggtttccaggtggatgtctcctcccccaatattacctgatgtatcttacatattgccaggctgatattttaagacattaaaaggtatatttcattattgagccacatggtattgattactgcttactaaaattttgtcattgtacacatctgtaaaaggtggttccttttggaatgcaaagttcaggtgtttgttgtctttcctgacctaaggtcttgtgagcttgtattttttctatttaagcagtgctttctcttggactggcttgactcatggcattctacacgttattgctggtctaaatgtgattttgccaagcttcttcaggacctataattttgcttgacttgtagccaaacacaagtaaaatgattaagcaacaaatgtatttgtgaagcttggtttttaggttgttgtgttgtgtgtgcttgtgctctataataatactatccaggggctggagaggtggctcggagttcaagagcacagactgctcttccagaagtcctgagttcaattcccagcaacgc

SEQ ID NO: 298 - DNA, 2772 bp, synthetic construct
  source 1..2772: mol_type = other DNA
ccttctccctctccagcctcggggctgtccgcggggggacggctgccttcgggggggacggggcagggcggggttcggcttctggcgtgtgaccggcggctctctcctgggcaacgtgctggttattgtgctgtctcatcattttggcaaagaattcctcgaggggcaaagaattcatgaggccggccaccatgtccgtcctgacgccgctgctgctgcggggcttgacaggctcggcccggcggctcccagtgccgcgcgccaagatccattcgttgggggatctgtccgtcctgacgccgctgctgctgcggggcttgacaggctcggcccggcggctcccagtgccgcgcgccaagatccattcgttgggggatccaccggtcgccaccgagatggcaagccagcagggcgagacgatgtccggaccgctgcacattggtttgattcccacagttggaccgtacctgctaccgcatattatccctatgctgcaccagacctttccaaagctggaaatgtatctgcatgaagcacagacccaccagttactggcgcaactggacagcggcaaactcgattgcgtgatcctcgcgctggtgaaagagagcgaagcattcattgaagtgccgttgtttgatgagccaatgttgctggctatctatgaagatcacccgtgggcgaaccgcgaatgcgtaccgatggccgatctggcaggggaaaaactgctgatgctggaagatggtcactctttgcgcgatcaggcaatgtccgccggctacaacagcgacaacgtctatatcatggccgacaagcagaagaacggcatcaaggccaacttcaagatccgccacaacgtcgaggacggcagcgtgcagctcgccgaccactaccagcagaacacccccatcggcgacggccccgtgctgctgcccgacaaccactacctgagcttccagtccgtcctgagcaaagaccccaacgagaagcgcgatcacatggtcctgctggagttcgtgaccgccgccgggatcactctcggcatggacgagctgtacaacgtggatggcggtagcggtggcaccggcagcaagggcgaggagctgttcaccggggtggtgcccatcctggtcgagctggacggcgacgtaaacggccacaagttcagcgtgtccggcgagggcgagggcgatgccacctacggcaagctgaccctgaagctgatctgcaccaccggcaagctgcccgtgccctggcccaccctcgtgaccaccctcggctacggcctgaagtgcttcgcccgctaccccgaccacatgaagcagcacgacttcttcaagtccgccatgcccgaaggctacgtccaggagcgcaccatcttcttcaaggacgacggcaactacaagacccgcgccgaggtgaagttcgagggcgacaccctggtgaaccgcatcgagctgaagggcatcggcttcaaggaggacggcaacatcctggggcacaagctggagtacaacggcaccggtttctgttttgaagccggggcggatgaagatacacacttccgcgcgaccagcctggaaactctgcgcaacatggtggcggcaggtagcgggatcactttactgccagcgctggctgtgccgccggagcgcaaacgcgatggggttgtttatctgccgtgcattaagccggaaccacgccgcactattggcctggtttatcgtcctggctcaccgctgcgcagccgctatgagcagctggcagaggccatccgcgcaagaatggatggccatttcgataaagttttaaaacaggcggtttaagaattccaccacactggactagtggatccgagctcggtaccaagcttaagtttaaaccgctgatcagcctcgactgtgccttctagttgccagccatctgttgtttgcccctcccccgtgccttccttgaccctggaaggtgccactcccactgtcctttcctaataaaatgaggaaattgcatcgcattgtctgagtaggtgtcattctattctggggggtggggtggggcaggacagcaagggggaggattgggaagacaatagcaggcatgctggggatgcggtgggctctatttgctggctttctgggcaggcttaaaggctaacctggtgtgtgggcgttgtcctgcaggggaattgaacaggtgtaaaattggagggacaagacttcccacagattttcggttttgtcgggaagttttttaataggggcaaataaggaaaatgggaggataggtagtcatctggggttttatgcagcaaaactacaggttattattgcttgtgatccgcctcggagtattttccatcgaggtagattaaagacatgctcacccgagttttatactctcctgcttgagatccttactacagtatgaaattacagtgtcgcgagttagactatgtaagcagaattttaatcatttttaaagagcccagtacttcatatccatttctcccgctccttctgcagccttatcaaaaggtattttagaacactcattttagccccattttcatttattatactggcttatccaacccctagacagagcattggcattttccctttcctgatcttagaagtctgatgactcatgaaaccagacagattagttacatacaccacaaatcgaggctgtagctggggcctcaacactgcagttcttttataactccttagtacactttttgttgatcctttgccttgatccttaattttc

SEQ ID NO: 299 - DNA, 3688 bp, synthetic construct
  source 1..3688: mol_type = other DNA
gggcatttcaagacttataaacttgaaaaatctctatttggcctggaactgctattttaacaaagtttgcgagaaaactaacatagaagatggagtatttgaaacgctgacaaatttggagttgctatcactatctttcaattctctttcacacgtgccacccaaactgccaagctccctacgcaaactttttctgagcaacacccagatcaaatacattagtgaagaagatttcaagggattgataaatttaacattactagatttaagcgggaactgtccgaggtgcttcaatgccccatttccatgcgtgccttgtgatggtggtgcttcaattaatatagatcgttttgcttttcaaaacttgacccaacttcgatacctaaacctctctagcacttccctcaggaagattaatgctgcctggtttaaaaatatgcctcatctgaaggtgctggatcttgaattcaactatttagtgggagaaatagcctctggggcatttttaacgatgctgccccgcttagaaatacttgacttgtcttttaactatataaaggggagttatccacagcatattaatatttccagaaacttctctaaacttttgtctctacgggcattgcatttaagaggttatgtgttccaggaactcagagaagatgatttccagcccctgatgcagcttccaaacttatcgactatcaacttgggtattaattttattaagcaaatcgatttcaaacttttccaaaatttctccaatctggaaattatttacttgtcagaaaacagaatatcaccgttggtaaaagatacccggcagagttatgcaaatagttcctcttttcaacgtcatatccggaaacgacgctcaacagattttgagtttgacccacattcgaacttttatcatttcacccgtcctttaataaagccacaatgtgctgcttatggaaaagccttagatttaagcctcaacagtattttcttcattgggccaaaccaatttgaaaatcttcctgacattgcctgtttaaatctgtctgcaaatagcaatgctcaagtgttaagtggaactgaattttcagccattcctcatgtcaaatatttggatttgacaaacaatagactagactttgataatgctagtgctcttactgaattgtccgacttggaagttctagatctcagctataattcacactatttcagaatagcaggcgtaacacatcatctagaatttattcaaaatttcacaaatctaaaagttttaaacttgagccacaacaacatttatactttaacagataagtataacctggaaagcaagtccctggtagaattagttttcagtggcaatcgccttgacattttgtggaatgatgatgacaacaggtatatctccattttcaaaggtctcaagaatctgacacgtctggatttatcccttaataggctgaagcacatcccaaatgaagcattccttaatttgccagcgagtctcactgaactacatataaatgataatatgttaaagttttttaactggacattactccagcagtttcctcgtctcgagttgcttgacttacgtggaaacaaactactctttttaactgatagcctatctgactttacatcttcccttcggacactgctgctgagtcataacaggatttcccacctaccctctggctttctttctgaagtcagtagtctgaagcacctcgatttaagttccaatctgctaaaaacaatcaacaaatccgcacttgaaactaagaccaccaccaaattatctatgttggaactacacggaaacccctttgaatgcacctgtgacattggagatttccgaagatggatggatgaacatctgaatgtcaaaattcccagactggtagatgtcatttgtgccagtcctggggatcaaagagggaagagtattgtgagtctggagctaacaacttgtgtttcagatgtcactgcagtgatattatttttcttcacgttctttatcaccaccatggttatgttggctgccctggctcaccatttgttttactgggatgtttggtttatatataatgtgtgtttagctaaggtaaaaggctacaggtctctttccacatcccaaactttctatgatgcttacatttcttatgacaccaaagatgcctctgttactgactgggtgataaatgagctgcgctaccaccttgaagagagccgagacaaaaacgttctcctttgtctagaggagagggattgggacccgggattggccatcatcgacaacctcatgcagagcatcaaccaaagcaagaaaacagtatttgttttaaccaaaaaatatgcaaaaagctggaactttaaaacagctttttacttggctttgcagaggctaatggatgagaacatggatgtgattatatttatcctgctggagccagtgttacagcattctcagtatttgaggctacggcagcggatctgtaagagctccatcctccagtggcctgacaacccgaaggcagaaggcttgttttggcaaactctgagaaatgtggtcttgactgaaaatgattcacggtataacaatatgtatgtcgattccattaagcaatactaacttaagtttaaaccgctgatcagcctcgactgtgccttctagttgccagccatctgttgtttgcccctcccccgtgccttccttgaccctggaaggtgccactcccactgtcctttcctaataaaatgaggaaattgcatcgcattgtctgagtaggtgtcattctattctggggggtggggtggggcaggacagcaagggggaggattgggaagacaatagcaggcatgctggggatgcggtgggctctataattcttctgggcaggcttaaaggctaacctggtgtgtgggcgttgtcctgcaggggaattgaacaggtgtaaaattggagggacaagacttcccacagattttcggttttgtcgggaagttttttaataggggcaaataaggaaaatgggaggataggtagtcatctggggttttatgcagcaaaactacaggttattattgcttgtgatccgcctcggagtattttccatcgaggtagattaaagacatgctcacccgagttttatactctcctgcttgagatccttactacagtatgaaattacagtgtcgcgagttagactatgtaagcagaattttaatcatttttaaagagcccagtacttcatatccatttctcccgctccttctgcagccttatcaaaaggtattttagaacactcattttagccccattttcatttattatactggcttatccaacccctagacagagcattggcattttccctttcctgatcttagaagtctgatgactcatgaaaccagacagattagttacatacaccacaaatcgaggctgtagctggggcctcaacactgcagttcttttataactccttagtacactttttgttgatcctttgccttgatccttaattttcagtgtctatcacctctcccgtcaggtggtgttccacatttgggcctattctcagtccagggagttttacaacaatagatgtattgagaatccaacctaaagcttaactttccactcccatgaatgcctctctcctttttctccatttataaactg

SEQ ID NO: 300 - DNA, 3688 bp, synthetic construct
  source 1..3688: mol_type = other DNA
gggcatttcaagacttataaacttgaaaaatctctatttggcctggaactgctattttaacaaagtttgcgagaaaactaacatagaagatggagtatttgaaacgctgacaaatttggagttgctatcactatctttcaattctctttcacacgtgccacccaaactgccaagctccctacgcaaactttttctgagcaacacccagatcaaatacattagtgaagaagatttcaagggattgataaatttaacattactagatttaagcgggaactgtccgaggtgcttcaatgccccatttccatgcgtgccttgtgatggtggtgcttcaattaatatagatcgttttgcttttcaaaacttgacccaacttcgatacctaaacctctctagcacttccctcaggaagattaatgctgcctggtttaaaaatatgcctcatctgaaggtgctggatcttgaattcaactatttagtgggagaaatagcctctggggcatttttaacgatgctgccccgcttagaaatacttgacttgtcttttaactatataaaggggagttatccacagcatattaatatttccagaaacttctctaaacttttgtctctacgggcattgcatttaagaggttatgtgttccaggaactcagagaagatgatttccagcccctgatgcagcttccaaacttatcgactatcaacttgggtattaattttattaagcaaatcgatttcaaacttttccaaaatttctccaatctggaaattatttacttgtcagaaaacagaatatcactgttggtaaaagatacccggcagagttatgcaaatagttcctcttttcaacgtcatatccggaaacgacgctcaacagattttgagtttgacccacattcgaacttttatcatttcacccgtcctttaataaagccacaatgtgctgcttatggaaaagccttagatttaagcctcaacagtattttcttcattgggccaaaccaatttgaaaatcttcctgacattgcctgtttaaatctgtctgcaaatagcaatgctcaagtgttaagtggaactgaattttcagccattcctcatgtcaaatatttggatttgacaaacaatagactagactttgataatgctagtgctcttactgaattgtccgacttggaagttctagatctcagctataattcacactatttcagaatagcaggcgtaacacatcatctagaatttattcaaaatttcacaaatctaaaagttttaaacttgagccacaacaacatttatactttaacagataagtataacctggaaagcaagtccctggtagaattagttttcagtggcaatcgccttgacattttgtggaatgatgatgacaacaggtatatctccattttcaaaggtctcaagaatctgacacgtctggatttatcccttaataggctgaagcacatcccaaatgaagcattccttaatttgccagcgagtctcactgaactacatataaatgataatatgttaaagttttttaactggacattactccagcagtttcctcgtctcgagttgcttgacttacgtggaaacaaactactctttttaactgatagcctatctgactttacatcttcccttcggacactgctgctgagtcataacaggatttcccacctaccctctggctttctttctgaagtcagtagtctgaagcacctcgatttaagttccaatctgctaaaaacaatcaacaaatccgcacttgaaactaagaccaccaccaaattatctatgttggaactacacggaaacccctttgaatgcacctgtgacattggagatttccgaagatggatggatgaacatctgaatgtcaaaattcccagactggtagatgtcatttgtgccagtcctggggatcaaagagggaagagtattgtgagtctggagctaacaacttgtgtttcagatgtcactgcagtgatattatttttcttcacgttctttatcaccaccatggttatgttggctgccctggctcaccatttgttttactgggatgtttggtttatatataatgtgtgtttagctaaggtaaaaggctacaggtctctttccacatcccaaactttctatgatgcttacatttcttatgacaccaaagatgcctctgttactgactgggtgataaatgagctgcgctaccaccttgaagagagccgagacaaaaacgttctcctttgtctagaggagagggattgggacccgggattggccatcatcgacaacctcatgcagagcatcaaccaaagcaagaaaacagtatttgttttaaccaaaaaatatgcaaaaagctggaactttaaaacagctttttacttggctttgcagaggctaatggatgagaacatggatgtgattatatttatcctgctggagccagtgttacagcattctcagtatttgaggctacggcagcggatctgtaagagctccatcctccagtggcctgacaacccgaaggcagaaggcttgttttggcaaactctgagaaatgtggtcttgactgaaaatgattcacggtataacaatatgtatgtcgattccattaagcaatactaacttaagtttaaaccgctgatcagcctcgactgtgccttctagttgccagccatctgttgtttgcccctcccccgtgccttccttgaccctggaaggtgccactcccactgtcctttcctaataaaatgaggaaattgcatcgcattgtctgagtaggtgtcattctattctggggggtggggtggggcaggacagcaagggggaggattgggaagacaatagcaggcatgctggggatgcggtgggctctataattcttctgggcaggcttaaaggctaacctggtgtgtgggcgttgtcctgcaggggaattgaacaggtgtaaaattggagggacaagacttcccacagattttcggttttgtcgggaagttttttaataggggcaaataaggaaaatgggaggataggtagtcatctggggttttatgcagcaaaactacaggttattattgcttgtgatccgcctcggagtattttccatcgaggtagattaaagacatgctcacccgagttttatactctcctgcttgagatccttactacagtatgaaattacagtgtcgcgagttagactatgtaagcagaattttaatcatttttaaagagcccagtacttcatatccatttctcccgctccttctgcagccttatcaaaaggtattttagaacactcattttagccccattttcatttattatactggcttatccaacccctagacagagcattggcattttccctttcctgatcttagaagtctgatgactcatgaaaccagacagattagttacatacaccacaaatcgaggctgtagctggggcctcaacactgcagttcttttataactccttagtacactttttgttgatcctttgccttgatccttaattttcagtgtctatcacctctcccgtcaggtggtgttccacatttgggcctattctcagtccagggagttttacaacaatagatgtattgagaatccaacctaaagcttaactttccactcccatgaatgcctctctcctttttctccatttataaactg

SEQ ID NO: 301 - DNA, 3125 bp, synthetic construct
  source 1..3125: mol_type = other DNA
aacctcccacacctccccctgaacctgaaacataaaatgaatgcaattgttgttgttaacttgtttattgcagcttataatggttacaaataaagcaatagcatcacaaatttcacaaataaagcatttttttcactgcattctagttgtggtttgtccaaactcatcaatgtatcttatcatgtctggatctgcgactctagaggatcataatcagccataccacatttgtagaggttttacttgctttaaaaaacctcccacacctccccctgaacctgaaacataaaatgaatgcaattgttgttgttaacttgtttattgcagcttataatggttacaaataaagcaatagcatcacaaatttcacaaataaagcatttttttcactgcattctagttgtggtttgtccaaactcatcaatgtatcttatcatgtctggatctgcgactctagaggatcataatcagccataccacatttgtagaggttttacttgctttaaaaaacctcccacacctccccctgaacctgaaacataaaatgaatgcaattgttgttgttaacttgtttattgcagcttataatggttacaaataaagcaatagcatcacaaatttcacaaataaagcatttttttcactgcattctagttgtggtttgtccaaactcatcaatgtatcttatcatgtctggatccccatcaagctgatccggaacccttaatataacttcgtataatgtatgctatacgaagttattaggtccctcgacctgcagcccaagctagatcgaatttctagactcgagtggatccgccaccatggccttcttgttgattacccgacggctggcctgcagttcccagaaaaacctccacctcttcatacctggatccagatatatcagccaagccgctgccaaagttgacattgaatttgattatgatggaccactcatgaagacggaagtcccggggcctagatctaaggaactaatgaaacagctgaacacaatccagaatgcagaggccgtgcactttttctgcaactatgaagagagcagaggtaactacctagtggacgtggacggcaaccgcatgttggacctgtattctcagatctcctctgtgcccataggttacaaccatccggctctggcgaaactcgttcaacagcctcagaacgcgagcactttcatcaacagacctgccttgggcatcctgcctccagagaactttgtggacaagctccaggagtccttgatgtcggtggcgcccaggggcatgtcccagctcatcaccatggcctgtggctcctgctccaatgagaatgcattcaagaccatcttcatgtggtaccggagtaaggaacgagggcagagaggtttctccaaagaggagctggagacttgcatggttaaccagagtcctggatgcccagactacagcattctctccttcatgggtgctttccatgggaggaccatgggttgcttagcgaccacacactccaaagcaattcacaagattgacatcccttcctttgactggcccattgctccattcccacggctgaaatatcccctggaggagtttacaacggacaaccagcaagaggaggcccgctgcctagaagaggtggaggatttaattgtgaaatatcggaaaaagaagagaacggtggctggaatcatcgtggagcccatccagtccgagggtggagacaaccatgcatcagatgacttcttccggaagctgagagacatagccaggaagcatggctgtgccttcttggtggacgaggtgcagaccggaggaggctgtacaggcaagttctgggcccatgaacactggggcttggatgacccagccgatgtgatgacgttcagcaagaaaatgatgaccgggggcttcttccacaaggaggagtttcggccaagtgctccttaccggattttcaatacctggctgggggacccatccaagaacttgctgctggctgaggtcatcaacatcatcaagcgggaagacctgctcaacaatgtggcccgtgtggggaagaccctactcacagggctgctggacctccaggcccagtaccctcagttcatcagcagagtgaggggacgaggcaccttctgttccttcgacactcccgatgaagccatacggaataaactcatcctaattgccaggaacaaaggtgtggtactggggggctgcggtgacaagtccatccgtttccgccccacgctggtcttcagggatcaccacgcccatctgttcctcagcattttcagcggcatcttagcagacttcaagtagcttaagtttaaaccgctgatcagcctcgactgtgccttctagttgccagccatctgttgtttgcccctcccccgtgccttccttgaccctggaaggtgccactcccactgtcctttcctaataaaatgaggaaattgcatcgcattgtctgagtaggtgtcattctattctggggggtggggtggggcaggacagcaagggggaggattgggaagacaatagcaggcatgctggggatgcggtgggctctataattcacagtgtcgcgagttagactatgtaagcagaattttaatcatttttaaagagcccagtacttcatatccatttctcccgctccttctgcagccttatcaaaaggtattttagaacactcattttagccccattttcatttattatactggcttatccaacccctagacagagcattggcattttccctttcctgatcttagaagtctgatgactcatgaaaccagacagattagttacatacaccacaaatcgaggctgtagctggggcctcaacactgcagttcttttataactccttagtacactttttgttgatcctttgccttgatccttaattttcagtgtctatcacctctcccgtcaggtggtgttccacatttgggcctattctcagtccagggagttttacaacaatagatgtattgagaatccaacctaaagcttaactttccactcccatgaatgcctctctcctttttctccatttataaactgagctattaaccattaatggtttccaggtggatgtctcctccccca

SEQ ID NO: 302 - DNA, 4103 bp, synthetic construct
  source 1..4103: mol_type = other DNA
cctcccacacctccccctgaacctgaaacataaaatgaatgcaattgttgttgttaacttgtttattgcagcttataatggttacaaataaagcaatagcatcacaaatttcacaaataaagcatttttttcactgcattctagttgtggtttgtccaaactcatcaatgtatcttatcatgtctggatctgcgactctagaggatcataatcagccataccacatttgtagaggttttacttgctttaaaaaacctcccacacctccccctgaacctgaaacataaaatgaatgcaattgttgttgttaacttgtttattgcagcttataatggttacaaataaagcaatagcatcacaaatttcacaaataaagcatttttttcactgcattctagttgtggtttgtccaaactcatcaatgtatcttatcatgtctggatctgcgactctagaggatcataatcagccataccacatttgtagaggttttacttgctttaaaaaacctcccacacctccccctgaacctgaaacataaaatgaatgcaattgttgttgttaacttgtttattgcagcttataatggttacaaataaagcaatagcatcacaaatttcacaaataaagcatttttttcactgcattctagttgtggtttgtccaaactcatcaatgtatcttatcatgtctggatccccatcaagctgatccggaacccttaatataacttcgtataatgtatgctatacgaagttattaggtccctcgacctgcagcccaagctagatcgaatttctagactcgagtggatccgccaccatggctaacagccaacctaaggcttcccagcaacgccaagcaaaagtcatgaccgccgccgcgggctcggcgagccgtgttgcggtgcccttattgttgtgtgcgctgctagtgcccggtggcgcctacgtgctggacgactctgacggcctgggcagagagttcgacggcatcggcgctgtgtctggcggcggagccacaagcagactgctggtcaactaccccgagccctacagaagcgagatcctggactacctgttcaagcccaacttcggcgccagcctgcacatcctgaaggtggaaatcggcggcgacggccagaccaccgacggcacagagcccagccacatgcactacgagctggatgagaactacttcagaggctacgagtggtggctgatgaaggaagccaagaagagaaaccccgacatcatcctgatgggcctgccttggagcttccccggctggctgggcaagggcttcagctggccctacgtgaacctgcagctgaccgcctactacgtcgtgcggtggattctgggcgccaagcactaccacgacctggacatcgactacatcggcatctggaacgagaggcccttcgacgccaactacatcaaagaactgaggaagatgctggattaccagggcctgcagagagtgcggatcattgccagcgacaacctgtgggagcccatcagcagctccctgctgctggaccaggaactgtggaaggtcgtcgacgtgatcggcgcccactaccctggcacctacaccgtgtggaacgccaagatgagcggcaagaagctgtggtccagcgaggacttcagcaccatcaacagcaacgtgggagccggctgctggtccagaatcctgaaccagaattacatcaacggcaacatgaccagcacaatcgcctggaacctggtggccagctactacgaggaactgccctacggcagatccggcctgatgaccgcccaggaaccttggagcggccactacgtggtggcttccccaatctgggtgtccgcccacaccacccagttcacccagcctggctggtactacctgaaaaccgtgggccacctggaaaagggcggcagctacgtggccctgaccgatggcctgggcaacctgaccatcatcatcgagacaatgagccaccagcacagcatgtgcatcagaccctacctgccctactacaacgtgtcccaccagctggccacattcaccctgaagggcagcctgagagagatccaggaactgcaggtctggtacaccaagctgggcaccccccagcagagactgcacttcaagcagctggacaccctgtggctgctggacggcagcggcagcttcaccctggaactggaagaggacgaaatcttcaccctgaccacactgaccaccggcagaaagggcagctaccccccacctcctagcagcaagccattccccaccaactacaaggacgacttcaacgtggaataccccctgttcagcgaggcccccaacttcgccgaccagaccggcgtgttcgagtactacatgaacaacgaggacagagagcacaggttcaccctgagacaggtgctgaaccagaggcccatcacctgggctgccgacgccagcagcaccatctccgtgatcggggaccaccactggaccaacatgaccgtgcagtgcgacgtgtacatcgagacacctagaagcggcggagtgtttatcgccggcagagtgaacaagggcggcatcctgatcagatccgctacaggcgtgttcttctggatcttcgccaacggcagctacagagtgaccgccgacctgggcggctggatcacatacgcctctggccacgccgacgtgaccgccaagagatggtacaccctgaccctgggcatcaagggctacttcgccttcggcatgctgaacggcaccatcctgtggaagaacgtgcgcgtgaagtaccccggccacggctgggctgccatcggcacccacacattcgagttcgcccagttcgacaacttcagagtggaagccgccagaggcggtggcggtggcggtaacaacatgttgatccccattgctgtgggcggtgccctggcagggctggtcctcatcgtcctcattgcctacctcattggcaggaagaggagtcacgccggctatcagaccatcgaacaaaaactcatctcagaagaggatctgtagtaaggtaccaagcttaagtttaaaccgctgatcagcctcgactgtgccttctagttgccagccatctgttgtttgcccctcccccgtgccttccttgaccctggaaggtgccactcccactgtcctttcctaataaaatgaggaaattgcatcgcattgtctgagtaggtgtcattctattctggggggtggggtggggcaggacagcaagggggaggattgggaagacaatagcaggcatgctggggatgcggtgggctctatttctgggcaggcttaaaggctaacctggtgtgtgggcgttgtcctgcaggggaattgaacaggtgtaaaattggagggacaagacttcccacagattttcggttttgtcgggaagttttttaataggggcaaataaggaaaatgggaggataggtagtcatctggggttttatgcagcaaaactacaggttattattgcttgtgatccgcctcggagtattttccatcgaggtagattaaagacatgctcacccgagttttatactctcctgcttgagatccttactacagtatgaaattacagtgtcgcgagttagactatgtaagcagaattttaatcatttttaaagagcccagtacttcatatccatttctcccgctccttctgcagccttatcaaaaggtattttagaacactcattttagccccattttcatttattatactggcttatccaacccctagacagagcattggcattttccctttcctgatcttagaagtctgatgactcatgaaaccagacagattagttacatacaccacaaatcgaggctgtagctggggcctcaacactgcagttcttttataactccttagtacactttttgttgatcctttgccttgatccttaattttcagtgtctatcacctctcccgtcaggtggtgttccacatttgggcctattctcagtccagggagttttacaacaatagatgtattgagaatccaacctaaagcttaactttccactcccatgaatgcctctctcctttttctccatttataaactgagct

SEQ ID NO: 303 - DNA, 4345 bp, synthetic construct; identical to SEQ ID NO: 278
  source 1..4345: mol_type = other DNA

SEQ ID NO: 304 - DNA, 4345 bp, synthetic construct
  source 1..4345: mol_type = other DNA
aacctcccacacctccccctgaacctgaaacataaaatgaatgcaattgttgttgttaacttgtttattgcagcttataatggttacaaataaagcaatagcatcacaaatttcacaaataaagcatttttttcactgcattctagttgtggtttgtccaaactcatcaatgtatcttatcatgtctggatctgcgactctagaggatcataatcagccataccacatttgtagaggttttacttgctttaaaaaacctcccacacctccccctgaacctgaaacataaaatgaatgcaattgttgttgttaacttgtttattgcagcttataatggttacaaataaagcaatagcatcacaaatttcacaaataaagcatttttttcactgcattctagttgtggtttgtccaaactcatcaatgtatcttatcatgtctggatctgcgactctagaggatcataatcagccataccacatttgtagaggttttacttgctttaaaaaacctcccacacctccccctgaacctgaaacataaaatgaatgcaattgttgttgttaacttgtttattgcagcttataatggttacaaataaagcaatagcatcacaaatttcacaaataaagcatttttttcactgcattctagttgtggtttgtccaaactcatcaatgtatcttatcatgtctggatccccatcaagctgatccggaacccttaatataacttcgtataatgtatgctatacgaagttattaggtccctcgacctgcagcccaagctagatcgaatttctagactcgagtggatccgccaccatgaatgaccagacccagtttacagaaagagccctgaccatcctgaccctggcacagaagctggcatccgaccaccagcacccacagctgcagcccatccacattctggccgctttcattgaaactcccgaggacgggagcgtgccttacctgcagaacctgatcgagaagggcaggtacgactacgacctgtttaagaaagtggtcaaccgaaatctggtgaggattcctcagcagcagccagcacctgcagagatcaccccaagctacgccctgggcaaggtgctgcaggacgcagccaaaatccagaagcagcagaaagacagcttcattgcacaggatcatatcctgttcgccctgtttaatgatagctccatccagcagattttcaaggaagcccaggtggacatcgaggctattaagcagcaggcactggagctgcgggggaacaccagaatcgactcccgcggcgctgataccaatacacccctggagtacctgtctaaatatgctattgatatgaccgaacaggcacggcagggcaagctggaccctgtcatcggaagagaggaagagattcgatcaacaatcagggtgctggccaggcggatcaaaagcaacccatgcctgattggagagcccgggatcggcaagacagctatcattgaaggggtggcacagcgcatcattgacgatgacgtgccaactatcctgcagggcgccaagctgttcagcctggatctggctgcactgaccgctggcgcaaaatacaagggagacttcgaagagaggtttaagggagtcctgaaagagattgaagagtccaagactctgatcgtgctgtttatcgatgagattcacatgctgatgggaaacgggaaagatgacgccgctaatatcctgaagcctgccctgagccgggggcagctgaaggtcattggcgctaccacaaacaatgaatacagatccatcgtcgagaaagacggcgccttcgaaagacgctttcagaagattgaagtggctgagccatccgtgagacagacagtcgcaatcctgcgcggcctgcagcccaagtatgagattcaccacggcgtgagaatcctggactctgcactggtcactgcagcccagctggccaagagatacctgccttatcgaaggctgccagacagcgccctggacctggtggatatctcctgtgctggagtggcagtggccagggacagtaaacctgaagagctggactcaaaggagcgacagctgcagctgattcaggtggaaatcaaggccctggaacgggatgaggacgctgatagtactaccaaggataggctgaaactggcccggcagaaagaggcttcactgcaggaagagctggaaccactgaggcagcggtacaacgaagagaagcacggacatgaagagctgacacaggccaagaaaaagctggacgagctggaaaacaaggccctggacgcagagcggagatacgatactgcaaccgctgccgacctgagatatttcgccatcccagatatcaagaagcagatcgaaaagctggaggaccaggtggcagaagaggaacgacgagcaggagccaactctatgattcagaatgtggtggactcagatacaatcagcgagactgccgctcggctgaccggcattcccgtgaaaaagctgtccgagtctgaaaacgagaagctgatccacatggagagggacctgagcagcgaagtggtcggccagatggacgccatcaaagccgtgagcaacgccgtcagactgagtcgctcaggcctggccaatccacgacagccagctagtttcctgtttctgggactgagcggctccggaaagacagagctggcaaaaaaggtggccgggttcctgtttaacgacgaggatatgatgatcagagtggattgctctgaactgagtgagaaatacgctgtcagtaagctgctgggcacaactgcaggatacgtggggtatgacgagggcggattcctgactaatcagctgcagtacaaaccttatagcgtgctgctgtttgatgaagtcgagaaggcccacccagacgtgctgaccgtcatgctgcagatgctggatgacggaaggattaccagcgggcagggcaagacaatcgactgctctaactgtatcgtgattatgacaagtaacctgggagccgagttcattaattcccagcaggggtctaaaatccaggaatctactaagaacctggtcatgggggctgtccggcagcatttcagacccgagtttctgaaccgcatctcaagcatcgtgattttcaataagctgagcaggaaagccatccacaagattgtggacatccgactgaaggagatcgaggaaaggttcgaacagaacgataagcattataaactgaatctgacccaggaggcaaaagactttctggccaagtacggatatagcgatgacatgggggcccgccctctgaaccgactgattcagaacgagatcctgaacaagctggccctgcgcattctgaagaacgaaatcaaagataaggagaccgtgaatgtggtcctgaaaaagggaaagtccagggacgagaacgtgcccgaggaagcagaggaatgtctggaggtcctgcctaatcacgaagctacaatcggggctgacactctgggagacgacgataacgaggatagtatggagattgacgatgacctggaccttaagtttaaaccgctgatcagcctcgactgtgccttctagttgccagccatctgttgtttgcccctcccccgtgccttccttgaccctggaaggtgccactcccactgtcctttcctaataaaatgaggaaattgcatcgcattgtctgagtaggtgtcattctattctggggggtggggtggggcaggacagcaagggggaggattgggaagacaatagcaggcatgctggggatgcggtgggctctataattcacagtgtcgcgagttagactatgtaagcagaattttaatcatttttaaagagcccagtacttcatatccatttctcccgctccttctgcagccttatcaaaaggtattttagaacactcattttagccccattttcatttattatactggcttatccaacccctagacagagcattggcattttccctttcctgatcttagaagtctgatgactcatgaaaccagacagattagttacatacaccacaaatcgaggctgtagctggggcctcaacactgcagttcttttataactccttagtacactttttgttgatcctttgccttgatccttaattttcagtgtctatcacctctcccgtcaggtggtgttccacatttgggcctattctcagtccagggagttttacaacaatagatgtattgagaatccaacctaaagcttaactttccactcccatgaatgcctctctcctttttctccatttataaactgagctattaaccattaatggtttccaggtggatgtctcctccccc

SEQ ID NO: 305 - DNA, 4165 bp, synthetic construct; identical to SEQ ID NO: 280
  source 1..4165: mol_type = other DNA

SEQ ID NO: 306 - DNA, 3951 bp, synthetic construct
  source 1..3951: mol_type = other DNA
aacctcccacacctccccctgaacctgaaacataaaatgaatgcaattgttgttgttaacttgtttattgcagcttataatggttacaaataaagcaatagcatcacaaatttcacaaataaagcatttttttcactgcattctagttgtggtttgtccaaactcatcaatgtatcttatcatgtctggatctgcgactctagaggatcataatcagccataccacatttgtagaggttttacttgctttaaaaaacctcccacacctccccctgaacctgaaacataaaatgaatgcaattgttgttgttaacttgtttattgcagcttataatggttacaaataaagcaatagcatcacaaatttcacaaataaagcatttttttcactgcattctagttgtggtttgtccaaactcatcaatgtatcttatcatgtctggatctgcgactctagaggatcataatcagccataccacatttgtagaggttttacttgctttaaaaaacctcccacacctccccctgaacctgaaacataaaatgaatgcaattgttgttgttaacttgtttattgcagcttataatggttacaaataaagcaatagcatcacaaatttcacaaataaagcatttttttcactgcattctagttgtggtttgtccaaactcatcaatgtatcttatcatgtctggatccccatcaagctgatccggaacccttaatataacttcgtataatgtatgctatacgaagttattaggtccctcgacctgcagcccaagctagatcgaatttctagactcgaggccaccatgtccaaggggcttctcctcctctggctggtgacggagctctggtggctttatctgacaccagctgcctcagaggatacaataatagggtttttgggccagccggtgactttgccttgtcattacctctcgtggtcccagagccgcaacagtatgtgctggggcaaaggttcatgtcccaattccaagtgcaatgcagagcttctccgtacagatggaacaagaatcatctccaggaagtcaacaaaatatacacttttggggaaggtccagtttggtgaagtgtccttgaccatctcaaacaccaatcgaggtgacagtggggtgtactgctgccgtatagaggtgcctggctggttcaatgatgtcaagaagaatgtgcgcttggagctgaggagagccacaacaaccaaaaaaccaacaacaaccacccggccaaccaccaccccttatgtgaccaccaccaccccagagctgcttccaacaacagtcatgaccacatctgttctcccaaccaccacaccaccccagacactagccaccactgccttcagtacagcagtgaccacgtgcccctcaacaacacctggctccttctcacaagaaaccacaaaagggtccgccttcactacagaatcagaaactctgcctgcatccaatcactctcaaagaagcatgatgaccatatctacagacatagccgtactcaggcccacaggctctaaccctgggattctcccatccacttcacagctgacgacacagaaaacaacattaacaacaagtgagtctttgcagaagacaactaaatcacatcagatcaacagcagacagaccatcttgatcattgcctgctgtgtgggatttgtgctaatggtgttattgtttctggcgtttctccttcgagggaaagtcacaggagccaactgtttgcagagacacaagaggccagacaacactgaagatagtgacagcgtccatcatcaccatcaccattcccgggttccgattttggaactaaaggagaagatccagccagaaatcttagagctgattaaacagcagcgcctgaaccgccttgtggaagggacctgctttaggaaactcaatgctcgccggagacaagacaagttttggtattgtcggctttcaccaaatcacaaggtcttacattatggcgacttggaagagagcccccaaggagaagtgccccacgattccctgcaggacaaattgccggtggcagatatcaaagcagtggtgacgggaaaggactgccctcatatgaaagagaaaggtgcccttaaacaaaacaaggaggtgcttgaacttgctttctccatcttatacgactcaaattgccaactgaacttcattgctcctgataagcatgagtactgcatctggacagatgggctgaatgcactgcttgggaaggacatgatgagtgacctgacacgcaatgacctggacaccctgctgagcatggagatcaagcttcgcctgctggacctggaaaacatccagatcccggatgcacctccgcctatccccaaggaacctagcaactatgactttgtctatgactgtaacacccgggatccaccggtcgccaccatggtgagcaagggcgaggagctgttcaccggggtggtgcccatcctggtcgagctggacggcgacgtaaacggccacaagttcagcgtgtccggcgagggcgagggcgatgccacctacggcaagctgaccctgaagttcatctgcaccaccggcaagctgcccgtgccctggcccaccctcgtgaccaccctgacctacggcgtgcagtgcttcagccgctaccccgaccacatgaagcagcacgacttcttcaagtccgccatgcccgaaggctacgtccaggagcgcaccatcttcttcaaggacgacggcaactacaagacccgcgccgaggtgaagttcgagggcgacaccctggtgaaccgcatcgagctgaagggcatcgacttcaaggaggacggcaacatcctggggcacaagctggagtacaactacaacagccacaacgtctatatcatggccgacaagcagaagaacggcatcaaggtgaacttcaagatccgccacaacatcgaggacggcagcgtgcagctcgccgaccactaccagcagaacacccccatcggcgacggccccgtgctgctgcccgacaaccactacctgagcacccagtccgccctgagcaaagaccccaacgagaagcgcgatcacatggtcctgctggagttcgtgaccgccgccgggatcactctcggcatggacgagctgtacaagtaacttaagtttaaaccgctgatcagcctcgactgtgccttctagttgccagccatctgttgtttgcccctcccccgtgccttccttgaccctggaaggtgccactcccactgtcctttcctaataaaatgaggaaattgcatcgcattgtctgagtaggtgtcattctattctggggggtggggtggggcaggacagcaagggggaggattgggaagacaatagcaggcatgctggggatgcggtgggctctataattcacagtgtcgcgagttagactatgtaagcagaattttaatcatttttaaagagcccagtacttcatatccatttctcccgctccttctgcagccttatcaaaaggtattttagaacactcattttagccccattttcatttattatactggcttatccaacccctagacagagcattggcattttccctttcctgatcttagaagtctgatgactcatgaaaccagacagattagttacatacaccacaaatcgaggctgtagctggggcctcaacactgcagttcttttataactccttagtacactttttgttgatcctttgccttgatccttaattttcagtgtctatcacctctcccgtcaggtggtgttccacatttgggcctattctcagtccagggagttttacaacaatagatgtattgagaatccaacctaaagcttaactttccactcccatgaatgcctctctcctttttctccatttataaactgagctattaaccattaatggtttccaggtggatgtctcctccccc

SEQ ID NO: 307 - DNA, 4239 bp, synthetic construct
  source 1..4239: mol_type = other DNA
aacctcccacacctccccctgaacctgaaacataaaatgaatgcaattgttgttgttaacttgtttattgcagcttataatggttacaaataaagcaatagcatcacaaatttcacaaataaagcatttttttcactgcattctagttgtggtttgtccaaactcatcaatgtatcttatcatgtctggatctgcgactctagaggatcataatcagccataccacatttgtagaggttttacttgctttaaaaaacctcccacacctccccctgaacctgaaacataaaatgaatgcaattgttgttgttaacttgtttattgcagcttataatggttacaaataaagcaatagcatcacaaatttcacaaataaagcatttttttcactgcattctagttgtggtttgtccaaactcatcaatgtatcttatcatgtctggatctgcgactctagaggatcataatcagccataccacatttgtagaggttttacttgctttaaaaaacctcccacacctccccctgaacctgaaacataaaatgaatgcaattgttgttgttaacttgtttattgcagcttataatggttacaaataaagcaatagcatcacaaatttcacaaataaagcatttttttcactgcattctagttgtggtttgtccaaactcatcaatgtatcttatcatgtctggatccccatcaagctgatccggaacccttaatataacttcgtataatgtatgctatacgaagttattaggtccctcgacctgcagcccaagctagatcgaatttctagactcgaggccaccatgatcaagatcgccaccaggaagtacctgggcaagcagaacgtgtacgacatcggcgtggagagggaccacaacttcgccctgaagaacggcttcatcgccagcaactgcttcaacgaattcatggacaagcagaagaacggcatcaaggcgaacttcaagatccgccacaacgtcgaggacggcagcgtgcagctcgccgaccactaccagcagaacacccccatcggcgacggccccgtgctgctgcccgacaaccactacctgagcacccattccaagctgagcaaagaccccaacgagaagcgcgatcacatggtcctgctggagttcgtgaccgccgccgggatcgacgaggtggacggcgagctgttcaccggggtggtgcccatcctggtcgagctggacggcgacgtaaacggccacaagttcagcgtgcgcggcgagggcgagggcgatgccaccaacggcaagctgaccctgaagttcatctgcaccaccggcaagctgcccgtgccctggcccaccctcgtgaccaccctgacctacggcgtgcagtgcttcagccgctaccccgaccacatgaagcagcacgacttcttcaagtccgccatgcccgaaggctacgtccaggagcgcaccatctccttcaaggacgacggcacctacaagacccgcgccgaggtgaagttcgagggcgacaccctggtgaaccgcatcgagctgaagggcatcgacttcaaggaggacggcaacatcctggggcacaagctggagtacaacttcaacagccacaacgtctatatcacggccggatccgccgagtactgcctgagctacgagaccgagatcctgaccgtggagtacggcctgctgcctatcggcaagatcgtggagaagaggatcgagtgcaccgtgtacagcgtggacaacaacggcaacatctacacccagcctgtggcccagtggcacgacaggggcgagcaggaggtgttcgagtactgcctggaggacggcagcctgatcagggccaccaaggaccacaagttcatgaccgtggacggccagatgctgcctatcgacgagatcttcgagagggagctggacctgatgagggtggacaacctgcctaactctagaggctccggcgccacgaacttctctctgttaaagcaagcaggagacgtggaagaaaaccccggtcctgccaccatggtgagcaagggcgaggagaataacatggccatcatcaaggagttcatgcgcttcaaggtgcacatggagggctccgtgaacggccacgagttcgagatcgagggcgagggcgagggccgcccctacgaggcctttcagaccgctaagctgaaggtgaccaagggtggccccctgcccttcgcctgggacatcctgtcccctcagttcatgtacggctccaaggtttacattaagcacccagccgacatccccgactacttcaagcagtccttccccgagggcttcaggtgggagcgcgtgatgaacttcgaggacggcggcattattcacgttaaccaggactcctccctgcaggacggcgtgttcatctacaaggtgaagctgcgcggcaccaacttcccctccgacggccccgtaatgcagaagaagaccatgggctatgaggcctccgaggagcggatgtaccccgaggacggcgccctgaagagcgagtgtaaggagaggctgaagctgaaggacggcggccactacgccgccgaggtcaagaccacctacaaggccaagaagcccgtgcagctgcccggcgcctacatcgtcgacatcaagttggacatcgtgtcccacaacgaggactacaccatcgtggaacagtacgaacgcactgagggccgccactccaccggcggcatggacgagctgtacaagggctccggcgagggcagaggaagtctgctaacatgcggtgacgtcgaggagaatcctggcccaatgaagctgctgccgtcggtggtgctgaagctccttctggctgcagttctttcggcactggtgactggcgagagcctggagcagcttcggagagggctagctgctggaaccagcaacccggacccttccactggatctacggaccagctgctacgcctaggaggcggccgggaccggaaagtccgtgacttgcaagaggcagatctggaccttttgagagtcactttatcctccaagccacaagcactggccacaccaagcaaggaggagcacgggaaaagaaagaagaaaggcaagggactagggaagaagagggacccatgtcttcggaaatacaaggacttctgcatccacggagaatgcaaatatgtgaaggagctccgggctccctcctgcatctgccacccaggttaccatggagagaggtgtcatgggctgagcctcccagtggaaaatcgcttatatacctatgaccatacaactatcctggctgtggtggccgtggtgctgtcctctgtctgtctgctggtcatcgtggggcttctcatgtttaggtaccataggagaggtggttatgatgtggaaaacgaagagaaagtgaagttgggcatgactaattcccacccggatccaccggtctaacttaagtttaaaccgctgatcagcctcgactgtgccttctagttgccagccatctgttgtttgcccctcccccgtgccttccttgaccctggaaggtgccactcccactgtcctttcctaataaaatgaggaaattgcatcgcattgtctgagtaggtgtcattctattctggggggtggggtggggcaggacagcaagggggaggattgggaagacaatagcaggcatgctggggatgcggtgggctctataattcacagtgtcgcgagttagactatgtaagcagaattttaatcatttttaaagagcccagtacttcatatccatttctcccgctccttctgcagccttatcaaaaggtattttagaacactcattttagccccattttcatttattatactggcttatccaacccctagacagagcattggcattttccctttcctgatcttagaagtctgatgactcatgaaaccagacagattagttacatacaccacaaatcgaggctgtagctggggcctcaacactgcagttcttttataactccttagtacactttttgttgatcctttgccttgatccttaattttcagtgtctatcacctctcccgtcaggtggtgttccacatttgggcctattctcagtccagggagttttacaacaatagatgtattgagaatccaacctaaagcttaactttccactcccatgaatgcctctctcctttttctccatttataaactgagctattaaccattaatggtttccaggtggatgtctcctccccc

SEQ ID NO: 308 - DNA, 4221 bp, synthetic construct
  source 1..4221: mol_type = other DNA
aacctcccacacctccccctgaacctgaaacataaaatgaatgcaattgttgttgttaacttgtttattgcagcttataatggttacaaataaagcaatagcatcacaaatttcacaaataaagcatttttttcactgcattctagttgtggtttgtccaaactcatcaatgtatcttatcatgtctggatctgcgactctagaggatcataatcagccataccacatttgtagaggttttacttgctttaaaaaacctcccacacctccccctgaacctgaaacataaaatgaatgcaattgttgttgttaacttgtttattgcagcttataatggttacaaataaagcaatagcatcacaaatttcacaaataaagcatttttttcactgcattctagttgtggtttgtccaaactcatcaatgtatcttatcatgtctggatctgcgactctagaggatcataatcagccataccacatttgtagaggttttacttgctttaaaaaacctcccacacctccccctgaacctgaaacataaaatgaatgcaattgttgttgttaacttgtttattgcagcttataatggttacaaataaagcaatagcatcacaaatttcacaaataaagcatttttttcactgcattctagttgtggtttgtccaaactcatcaatgtatcttatcatgtctggatccccatcaagctgatccggaacccttaatataacttcgtataatgtatgctatacgaagttattaggtccctcgacctgcagcccaagctagatcgaatttctagactcgaggccaccatgatcaagatcgccaccaggaagtacctgggcaagcagaacgtgtacgacatcggcgtggagagggaccacaacttcgccctgaagaacggcttcatcgccagcaactgcttcaacgaattcggcgtgctgaagggcgacattaagatggccctgcgcctgaaggacggcggccgctacctggcggacttcaagaccacctacaaggccaagaagcccgtgcagatgcccggcgcctacaacgtcgaccgcaagttggacatcacctcccacaacgaggactacaccgtggtggaacagtacgaacgctccgagggccgccactccaccgacgaggtggacggcgtgatcaaggagttcatgcggttcaaggtgcacatggagggctccatgaacggccacgagttcgagatcgagggcgagggcgagggccgcccctacgagggcacccagaccgccaagctgaaggtgaccaagggtggccccctgcccttctcctgggacatcctgtcccctcagttcatgtacggctccagggccttcatcaagcaccccgccgacatccccgactactataagcagtccttccccgagggcttcaagtgggagcgcgtgatgaacttcgaggacggcggcgccgtgaccgtgacccaggacacctccctggaggacggcaccctgatctacaaggtgaagctccgcggcaccaacttccctcctgacggccccgtaatgcagaagaagacaatgggctgggaagcgtccaccgagcggttgtaccccgaggacggatccgccgagtactgcctgagctacgagaccgagatcctgaccgtggagtacggcctgctgcctatcggcaagatcgtggagaagaggatcgagtgcaccgtgtacagcgtggacaacaacggcaacatctacacccagcctgtggcccagtggcacgacaggggcgagcaggaggtgttcgagtactgcctggaggacggcagcctgatcagggccaccaaggaccacaagttcatgaccgtggacggccagatgctgcctatcgacgagatcttcgagagggagctggacctgatgagggtggacaacctgcctaactctagaggctccggcgccacgaacttctctctgttaaagcaagcaggagacgtggaagaaaaccccggtcctgccaccatgagtaaaggagaagaacttttcactggagttgtcccaattcttgttgaattagatggtgatgttaatgggcacaaattttctgtcagtggagagggtgaaggtgatgcaacatacggaaaacttacccttaaatttatttgcactactggaaaactacctgttccatggccaacacttgtcactacgttaacttatggtgttcaatgcttttcaagatacccagatcatatgaaacggcatgactttttcaagagtgccatgcccgaaggttacgtacaggaaagaactatatttttcaaagatgacgggaactacaagacacgtgctgaagtcaagtttgaaggtgatacccttgttaatagaatcgagttaaaaggtattgattttaaagaagatggaaacattcttggacacaaattggaatacaactataacgatcaccaggtgtacatcatggcagacaaacaaaagaatggaatcaaagctaacttcaaaattagacacaacattgaagatggaggcgttcaactagcagaccattatcaacaaaatactccaattggcgatgggcccgtccttttaccagacaaccattacctgtttacaacttctactctttcgaaagatcccaacgaaaagagagaccacatggtccttcttgagtttgtaacagctgctgggattacacatggcatggatgaactatacaaaggctccggcgagggcagaggaagtctgctaacatgcggtgacgtcgaggagaatcctggcccaatgaagctgctgccgtcggtggtgctgaagctccttctggctgcagttctttcggcactggtgactggcgagagcctggagcagcttcggagagggctagctgctggaaccagcaacccggacccttccactggatctacggaccagctgctacgcctaggaggcggccgggaccggaaagtccgtgacttgcaagaggcagatctggaccttttgagagtcactttatcctccaagccacaagcactggccacaccaagcaaggaggagcacgggaaaagaaagaagaaaggcaagggactagggaagaagagggacccatgtcttcggaaatacaaggacttctgcatccacggagaatgcaaatatgtgaaggagctccgggctccctcctgcatctgccacccaggttaccatggagagaggtgtcatgggctgagcctcccagtggaaaatcgcttatatacctatgaccatacaactatcctggctgtggtggccgtggtgctgtcctctgtctgtctgctggtcatcgtggggcttctcatgtttaggtaccataggagaggtggttatgatgtggaaaacgaagagaaagtgaagttgggcatgactaattcccacccggatccaccggtctaacttaagtttaaaccgctgatcagcctcgactgtgccttctagttgccagccatctgttgtttgcccctcccccgtgccttccttgaccctggaaggtgccactcccactgtcctttcctaataaaatgaggaaattgcatcgcattgtctgagtaggtgtcattctattctggggggtggggtggggcaggacagcaagggggaggattgggaagacaatagcaggcatgctggggatgcggtgggctctataattcacagtgtcgcgagttagactatgtaagcagaattttaatcatttttaaagagcccagtacttcatatccatttctcccgctccttctgcagccttatcaaaaggtattttagaacactcattttagccccattttcatttattatactggcttatccaacccctagacagagcattggcattttccctttcctgatcttagaagtctgatgactcatgaaaccagacagattagttacatacaccacaaatcgaggctgtagctggggcctcaacactgcagttcttttataactccttagtacactttttgttgatcctttgccttgatccttaattttcagtgtctatcacctctcccgtcaggtggtgttccacatttgggcctattctcagtccagggagttttacaacaatagatgtattgagaatccaacctaaagcttaactttccactcccatgaatgcctctctcctttttctccatttataaactgagctattaaccattaatggtttccaggtggatgtctcctccccc

SEQ ID NO: 309 - DNA, 3520 bp, synthetic construct
  source 1..3520: mol_type = other DNA
ggagcggctcggggggtgcgtgcgtgtgtgtgtgcgtggggagcgccgcgtgcggctccgcgctgcccggcggctgtgagcgctgcgggcgcggcgcggggctttgtgcgctccgcagtgtgcgcgaggggagcgcggccgggggcggtgccccgcggtgcggggggggctgcgaggggaacaaaggctgcgtgcggggtgtgtgcgtgggggggtgagcagggggtgtgggcgcgtcggtcgggctgcaaccccccctgcacccccctccccgagttgctgagcacggcccggcttcgggtgcggggctccgtacggggcgtggcgcggggctcgccgtgccgggcggggggtggcggcaggtgggggtgccgggcggggcggggccgcctcgggccggggagggctcgggggaggggcgcggcggcccccggagcgccggcggctgtcgaggcgcggcgagccgcagccattgccttttatggtaatcgtgcgagagggcgcagggacttcctttgtcccaaatctgtgcggagccgaaatctgggaggcgccgccgcaccccctctagcgggcgcggggcgaagcggtgcggcgccggcaggaaggaaatgggcggggagggccttcgtgcgtcgccgcgccgccgtccccttctccctctccagcctcggggctgtccgcggggggacggctgccttcgggggggacggggcagggcggggttcggcttctggcgtgtgaccggcggctctagagcctctgctaaccatgttcatgccttcttctttttcctacagctcctgggcaacgtgctggttattgtgctgtctcatcattttggcaaagaattcagccaccatggctcccagcagcccccggcccgcgctgcccgcactcctggtcctgctcggggctctgttcccaggacctggcaatgcccagacatctgtgtccccctcaaaagtcatcctgccccggggaggctccgtgctggtgacatgcagcacctcctgtgaccagcccaagttgttgggcatagagaccccgttgcctaaaaaggagttgctcctgcctgggaacaaccggaaggtgtatgaactgagcaatgtgcaagaagatagccaaccaatgtgctattcaaactgccctgatgggcagtcaacagctaaaaccttcctcaccgtgtactggactccagaacgggtggaactggcacccctcccctcttggcagccagtgggcaagaaccttaccctacgctgccaggtggagggtggggcaccccgggccaacctcaccgtggtgctgctccgtggggagaaggagctgaaacgggagccagctgtgggggagcccgctgaggtcacgaccacggtgctggtgaggagagatcaccatggagccaatttctcgtgccgcactgaactggacctgcggccccaagggctggcattgttctctaatgtctccgaggccaggagcctccggactttcgatcttccagctaccatcccaaagctcgacacccctgacctcctggaggtgggcacccagcagaagttgttttgctccctggaaggcctgtttcctgcctctgaagctcggatatacctggagctgggaggccagatgccgacccaggagagcacaaacagcagtgactctgtgtcagccactgccttggtagaggtgactgaggagttcgacagaaccctgccgctgcgctgcgttttggagctagcggaccagatcctggagacgcagaggaccttaacagtctacaacttttcagctccggtcctgaccctgagccagctggaggtctcggaagggagccaagtaactgtgaagtgtgaagcccacagtgggtcgaaggtggttcttctgagcggcgtcgagcctaggccacccaccccgcaggtccaattcacactgaatgccagctcggaggatcacaaacgaagcttcttttgctctgccgctctggaggtggcgggaaagttcctgtttaaaaaccagaccctggaactgcacgtgctgtatggtcctcggctggacgagacggactgcttggggaactggacctggcaagaggggtctcagcagactctgaaatgccaggcctgggggaacccatctcctaagatgacctgcagacggaaggcagatggtgccctgctgcccatcggggtggtgaagtctgtcaaacaggagatgaatggtacatacgtgtgccatgcctttagctcccatgggaatgtcaccaggaatgtgtacctgacagtactgtaccactctcaaaataactggactataatcattctggtgccagtactgctggtcattgtgggcctcgtgatggcagcctcttatgtttataaccgccagagaaagatcaggatatacaagttacagaaggctcaggaggaggccataaaactcaagggacaagccccacctccctgactcgagcttattccagatgcgtgcggatgctgtgccttctagttgccagccatctgttgtttgcccctcccccgtgccttccttgaccctggaaggtgccactcccactgtcctttcctaataaaatgaggaaattgcatcgcattgtctgagtaggtgtcattctattctggggggtggggtggggcaggacagcaagggggaggattgggaagacaatagcaggcatgctggggatgcggtgggctctatttctgggcaggcttaaaggctaacctggtgtgtgggcgttgtcctgcaggggaattgaacaggtgtaaaattggagggacaagacttcccacagattttcggttttgtcgggaagttttttaataggggcaaataaggaaaatgggaggataggtagtcatctggggttttatgcagcaaaactacaggttattattgcttgtgatccgcctcggagtattttccatcgaggtagattaaagacatgctcacccgagttttatactctcctgcttgagatccttactacagtatgaaattacagtgtcgcgagttagactatgtaagcagaattttaatcatttttaaagagcccagtacttcatatccatttctcccgctccttctgcagccttatcaaaaggtattttagaacactcattttagccccattttcatttattatactggcttatccaacccctagacagagcattggcattttccctttcctgatcttagaagtctgatgactcatgaaaccagacagattagttacatacaccacaaatcgaggctgtagctggggcctcaacactgcagttcttttataactccttagtacactttttgttgatcctttgccttgatccttaattttcagtgtctatcacctctcccgtcaggtggtgttccacatttgggcctattctcagtccagggagttttacaacaatagatgtattgagaatccaacctaaagcttaactttccactcccatgaatgcctctctcctttttctccatttataaactgagc

SEQ ID NO: 310 - DNA, 5652 bp, synthetic construct
  source 1..5652: mol_type = other DNA
ccgcggcaggccctccgagcgtggtggagccgttctgtgagacagccgggtacgagtcgtgacgctggaaggggcaagcgggtggtgggcaggaatgcggtccgccctgcagcaaccggagggggagggagaagggagcggaaaagtctccaccggacgcggccatggctcgggggggggggggcagcggaggagcgcttccggccgacgtctcgtcgctgattggcttcttttcctcccgccgtgtgtgaaaacacaaatggcgtgttttggttggcgtaaggcgcctgtcagttaacggcagccggagtgcgcagccgccggcagcctcgctctgcccactgggtggggcgggaggtaggtggggtgaggcgagctggacgtgcgggcgcggtcggcctctggcggggcgggggaggggagggagggtcagcgaaagtagctcgcgcgcgagcggccgcccaccctccccttcctctgggggagtcgttttacccgccgccggccgggcctcgtcgtctgattggctctcggggcccagaaaactggcccttgccattggctcgtgttcgtgcaagttgagtccatccgccggccagcgggggcggcgaggaggcgctcccaggttccggccctcccctcggccccgcgccgcagagtctggccgcgcgcccctgcgcaacgtggcaggaagcgcgcgctgggggcggggacgggcagtagggctgagcggctgcggggcgggtgcaagcacgtttccgacttgagttgcctcaagaggggcgtgctgagccagacctccatcgcgcactccggggagtggagggaaggagcgagggctcagttgggctgttttggaggcaggaagcacttgctctcccaaagtcgctctgagttgttatcagtaagggagctgcagtggagtaggcggggagaaggccgcacccttctccggaggggggaggggagtgttgcaatacctttctgggagttctctgctgcctcctggcttctgaggaccgccctgggcctgggagaatcccttccccctcttccctcgtgatctgcaactccagtctttctagttaattaaccgtttaaacaattctgcaggaatctagttattaatagtaatcaattacggggtcattagttcatagcccatatatggagttccgcgttacataacttacggtaaatggcccgcctggctgaccgcccaacgacccccgcccattgacgtcaataatgacgtatgttcccatagtaacgccaatagggactttccattgacgtcaatgggtggagtatttacggtaaactgcccacttggcagtacatcaagtgtatcatatgccaagtacgccccctattgacgtcaatgacggtaaatggcccgcctggcattatgcccagtacatgaccttatgggactttcctacttggcagtacatctacgtattagtcatcgctattaccatggtcgaggtgagccccacgttctgcttcactctccccatctcccccccctccccacccccaattttgtatttatttattttttaattattttgtgcagcgatgggggcggggggggggggggggcgcgcgccaggcggggcggggcggggcgaggggcggggcggggcgaggcggagaggtgcggcggcagccaatcagagcggcgcgctccgaaagtttccttttatggcgaggcggcggcggcggcggccctataaaaagcgaagcgcgcggcgggcggggagtcgctgcgacgctgccttcgccccgtgccccgctccgccgccgcctcgcgccgcccgccccggctctgactgaccgcgttactcccacaggtgagcgggcgggacggcccttctcctccgggctgtaattagcgcttggtttaatgacggcttgtttcttttctgtggctgcgtgaaagccttgaggggctccgggagggccctttgtgcggggggagcggctcggggggtgcgtgcgtgtgtgtgtgcgtggggagcgccgcgtgcggctccgcgctgcccggcggctgtgagcgctgcgggcgcggcgcggggctttgtgcgctccgcagtgtgcgcgaggggagcgcggccgggggcggtgccccgcggtgcggggggggctgcgaggggaacaaaggctgcgtgcggggtgtgtgcgtgggggggtgagcagggggtgtgggcgcgtcggtcgggctgcaaccccccctgcacccccctccccgagttgctgagcacggcccggcttcgggtgcggggctccgtacggggcgtggcgcggggctcgccgtgccgggcggggggtggcggcaggtgggggtgccgggcggggcggggccgcctcgggccggggagggctcgggggaggggcgcggcggcccccggagcgccggcggctgtcgaggcgcggcgagccgcagccattgccttttatggtaatcgtgcgagagggcgcagggacttcctttgtcccaaatctgtgcggagccgaaatctgggaggcgccgccgcaccccctctagcgggcgcggggcgaagcggtgcggcgccggcaggaaggaaatgggcggggagggccttcgtgcgtcgccgcgccgccgtccccttctccctctccagcctcggggctgtccgcggggggacggctgccttcgggggggacggggcagggcggggttcggcttctggcgtgtgaccggcggctctagagcctctgctaaccatgttcatgccttcttctttttcctacagctcctgggcaacgtgctggttattgtgctgtctcatcattttggcaaagaattgatttgataccgcgggccctaagaagttcctattctctagaaagtataggaacttcgtcgacatttaaatcatttaaatataacttcgtataatgtatgctatacgaagttattcgcgatgaataaatgaaagcttgcagatctgcgactctagaggatctgcgactctagaggatcataatcagccataccacattttgtagaggttttacttgctttaaaaaacctcccacacctccccctgaacctgaaacataaaatgaatgcaattgttgttgttaacttgtttattgcagcttataatggttacaaataaagcaatagcatcacaaatttcacaaataaagcatttttttcactgcattctagttgtggtttgtccaaactcatcaatgtatcttatcatgtctggatctgcgactctagaggatcataatcagccataccacatttgtagaggttttacttgctttaaaaaacctcccacacctccccctgaacctgaaacataaaatgaatgcaattgttgttgttaacttgtttattgcagcttataatggttacaaataaagcaatagcatcacaaatttcacaaataaagcatttttttcactgcattctagttgtggtttgtccaaactcatcaatgtatcttatcatgtctggatctgcgactctagaggatcataatcagccataccacatttgtagaggttttacttgctttaaaaaacctcccacacctccccctgaacctgaaacataaaatgaatgcaattgttgttgttaacttgtttattgcagcttataatggttacaaataaagcaatagcatcacaaatttcacaaataaagcatttttttcactgcattctagttgtggtttgtccaaactcatcaatgtatcttatcatgtctggatccccatcaagctgatccggaacccttaatataacttcgtataatgtatgctatacgaagttattaggtccctcgaccttaggtccctcgacctgcagcccaagctagatcgaattcggccggccgatatcggcgcgccgccaccatgtctgcacttctgatcctagctcttgttggagctgcagttgctgactacaaagacgatgacgacaagcttgcggccgcgatgaaagtatttggccgttgcgagcttgcggcggcgatgaaacgtcatggcctggacaactaccgggggtattccttgggtaactgggtttgcgctgcgaaattcgaaagcaattttaatactcaagccaccaatcgcaacaccgacggctcgaccgattatgggatcttacagattaattctcgttggtggtgtaacgacggtcgcacaccaggtagtagaaatctctgcaacatcccgtgtagcgccctgctgtcatcggatatcacggcaagtgtcaactgtgctaagaaaattgtgagcgatggcaatggtatgaacgcatgggttgcctggcgcaaccgctgtaaaggcacggatgtgcaggcatggattcgaggctgccgtctgtaagcagcctcgactgtgccttctagttgccagccatctgttgtttgcccctcccccgtgccttccttgaccctggaaggtgccactcccactgtcctttcctaataaaatgaggaaattgcatcgcattgtctgagtaggtgtcattctattctggggggtggggtggggcaggacagcaagggggaggattgggaagacaatagcaggcatgctggggatgcggtgggctctataattcacagtgtcgcgagttagactatgtaagcagaattttaatcatttttaaagagcccagtacttcatatccatttctcccgctccttctgcagccttatcaaaaggtattttagaacactcattttagccccattttcatttattatactggcttatccaacccctagacagagcattggcattttccctttcctgatcttagaagtctgatgactcatgaaaccagacagattagttacatacaccacaaatcgaggctgtagctggggcctcaacactgcagttcttttataactccttagtacactttttgttgatcctttgccttgatccttaattttcagtgtctatcacctctcccgtcaggtggtgttccacatttgggcctattctcagtccagggagttttacaacaatagatgtattgagaatccaacctaaagcttaactttccactcccatgaatgcctctctcctttttctccatttataaactgagctattaaccattaatggtttccaggtggatgtctcctcccccaatattacctgatgtatcttacatattgccaggctgatattttaagacattaaaaggtatatttcattattgagccacatggtattgattactgcttactaaaattttgtcattgtacacatctgtaaaaggtggttccttttggaatgcaaagttcaggtgtttgttgtctttcctgacctaaggtcttgtgagcttgtattttttctatttaagcagtgctttctcttggactggcttgactcatggcattctacacgttattgctggtctaaatgtgattttgccaagcttcttcaggacctataattttgcttgacttgtagccaaacacaagtaaaatgattaagcaacaaatgtatttgtgaagcttggtttttaggttgttgtgttgtgtgtgcttgtgctctataataatactatccaggggctggagaggtggctcggagttcaagagcacagactgctcttccagaagtcctgagttcaattcccagcaac

SEQ ID NO: 311 - DNA, 4484 bp, synthetic construct
  source 1..4484: mol_type = other DNA
ttctcctccgggctgtaattagcgcttggtttaatgacggcttgtttcttttctgtggctgcgtgaaagccttgaggggctccgggagggccctttgtgcggggggagcggctcggggggtgcgtgcgtgtgtgtgtgcgtggggagcgccgcgtgcggctccgcgctgcccggcggctgtgagcgctgcgggcgcggcgcggggctttgtgcgctccgcagtgtgcgcgaggggagcgcggccgggggcggtgccccgcggtgcggggggggctgcgaggggaacaaaggctgcgtgcggggtgtgtgcgtgggggggtgagcagggggtgtgggcgcgtcggtcgggctgcaaccccccctgcacccccctccccgagttgctgagcacggcccggcttcgggtgcggggctccgtacggggcgtggcgcggggctcgccgtgccgggcggggggtggcggcaggtgggggtgccgggcggggcggggccgcctcgggccggggagggctcgggggaggggcgcggcggcccccggagcgccggcggctgtcgaggcgcggcgagccgcagccattgccttttatggtaatcgtgcgagagggcgcagggacttcctttgtcccaaatctgtgcggagccgaaatctgggaggcgccgccgcaccccctctagcgggcgcggggcgaagcggtgcggcgccggcaggaaggaaatgggcggggagggccttcgtgcgtcgccgcgccgccgtccccttctccctctccagcctcggggctgtccgcggggggacggctgccttcgggggggacggggcagggcggggttcggcttctggcgtgtgaccggcggctctagctagagcctctgctaaccatgttcatgccttcttctttttcctacagctcctgggcaacgtgctggttattgtgctgtctcatcattttataacttcgtataggatactttatacgaagttattcgcgatgaataaatgaaagcttgcagatctgcgactctagaggatctgcgactctagaggatcataatcagccataccacattttgtagaggttttacttgctttaaaaaacctcccacacctccccctgaacctgaaacataaaatgaatgcaattgttgttgttaacttgtttattgcagcttataatggttacaaataaagcaatagcatcacaaatttcacaaataaagcatttttttcactgcattctagttgtggtttgtccaaactcatcaatgtatcttatcatgtctggatctgcgactctagaggatcataatcagccataccacatttgtagaggttttacttgctttaaaaaacctcccacacctccccctgaacctgaaacataaaatgaatgcaattgttgttgttaacttgtttattgcagcttataatggttacaaataaagcaatagcatcacaaatttcacaaataaagcatttttttcactgcattctagttgtggtttgtccaaactcatcaatgtatcttatcatgtctggatctgcgactctagtggatcataatcagccataccacatgtgtagaggttcttgctatgcaaacctcccacacctcctgaacctgaaacatatgaatgcatgttgttgttaacttgtttattgcagcttataatggttacaaataaagcaatagcatcacaaatttcacaaataaagcatttttttcactgcattctagttgtggtttgtccaaactcatcaatgtatcttatcatgtctggatccccatcaagctgatccggaacccttaatataacttcgtataggatactttatacgaagttattaggtccctcgagccaccatgtcatcaagcagttggttgcttttgtctctggttgcagtgaccgctgctcaaagtactatagaagaacaggccaagacttttctggacaagttcaatcatgaggccgaagatctcttctatcagtcttcactcgcaagctggaattacaatactaacataactgaggagaatgtacaaaacatgaataacgctggtgacaaatggtcagcttttctcaaggagcaatccactttggctcaaatgtatccactccaggaaatacaaaacctgaccgtaaaacttcaactccaggccctccaacagaatggtagtagcgtcctgtctgaggataagtcaaagcgcctcaatactatcctcaacacaatgagtactatctattctacagggaaggtgtgtaaccccgataacccacaggagtgtcttctccttgagcctggactcaacgaaataatggccaactccctcgactacaacgaaaggctttgggcatgggaatcttggcgatcagaggtgggtaaacagctcagacctctctatgaagaatacgtagtacttaagaatgagatggcacgagctaatcattacgaggactacggggattattggaggggagattatgaggttaatggagtagatgggtatgattactcaagaggccaacttattgaggacgtcgagcacactttcgaggaaatcaaacctctgtatgagcacctgcacgcatatgtgagagcaaaactgatgaacgcttacccttcatacattagccctatcggttgcctccctgcccatttgcttggagatatgtggggaaggttttggacaaacttgtactccctcacagtcccatttggtcagaagcccaacatcgatgtaacagatgcaatggttgaccaggcatgggacgctcaaagaatattcaaggaggctgagaaatttttcgtatcagttggacttcctaatatgacccagggtttttgggagaattcaatgctgactgatccaggtaatgtgcaaaaggccgtatgccatccaaccgcctgggatctgggcaagggggacttcagaattctcatgtgcaccaaggtcacaatggacgatttcttgaccgcccaccatgaaatgggtcacatccagtatgatatggcctatgctgcccaacccttccttttgcggaacggagcaaacgaggggtttcacgaggcagttggtgaaataatgtcattgtccgctgccactcctaaacaccttaaatcaatcgggctgcttagtcccgatttccaggaagataacgaaacagaaatcaatttcctcttgaaacaggcactgaccatcgtcgggaccttgcccttcacttatatgcttgagaaatggaggtggatggtcttcaaaggtgaaattccaaaagatcagtggatgaagaaatggtgggaaatgaagagagaaatagtgggggttgtagagcctgtacctcacgatgagacctactgtgaccccgcctcattgttccatgtttctaatgattattcattcatccggtactacactcggactctgtaccagttccaattccaagaagctttgtgtcaagccgcaaagcacgagggaccactgcataaatgtgacatatccaattcaactgaagccggacagaaactgttcaacatgcttaggcttgggaaaagcgaaccatggacacttgctctggaaaacgtcgtcggcgccaaaaatatgaacgtacgacctttgctcaactactttgagccattgtttacatggcttaaggatcaaaataagaactcatttgttggctggagcacagactggtctccttacgcagatcaatcaattaaggttaggatatcactcaagtccgctctgggagacaaggcctatgagtggaatgacaacgagatgtacctgtttagatcctctgtcgcttacgccatgaggcagtacttcttgaaggtgaagaaggcacagtcgaggctgctggctatggctcacatctgtcattaactctagttccagtgcacctgacaccgtcttctggcctctgcagtgaccaagcacatgggtagtatgtagacatatacataagcaaaacacacatcattaaaaagtgacatttcccaaaggaagctgaagaaccagttcttgagaagatagtagaaatcagaaggggaaatagtagacatacagagggactgaccaggttgtgtcacctttataggctaggctaatggatgatcgacactagcgctctttgtgaaggacacacaaatgagacatagtttataggactaaacacacttctaagcaatttaatgagacttaagaccctgtctctagcaaatactctggatgatattcagctcaaggctcttgtcagacatgtttccattttcaaggtgagctaactggccaaaactgccaacaacctgtagtgaatagagaagatgagaaaatctggattctcaaatgacctaatgaaagccactggagcgccatatggtttctgtgaaaatgccttttcaatcattaacctcttaaatgagtgttagcatcctaactaatgagtggtgcagaatagtgggtctgcttagcttaactaaggcc

SEQ ID NO: 312 - DNA, 3748 bp, synthetic construct
  source 1..3748: mol_type = other DNA
aacctcccacacctccccctgaacctgaaacataaaatgaatgcaattgttgttgttaacttgtttattgcagcttataatggttacaaataaagcaatagcatcacaaatttcacaaataaagcatttttttcactgcattctagttgtggtttgtccaaactcatcaatgtatcttatcatgtctggatctgcgactctagaggatcataatcagccataccacatttgtagaggttttacttgctttaaaaaacctcccacacctccccctgaacctgaaacataaaatgaatgcaattgttgttgttaacttgtttattgcagcttataatggttacaaataaagcaatagcatcacaaatttcacaaataaagcatttttttcactgcattctagttgtggtttgtccaaactcatcaatgtatcttatcatgtctggatctgcgactctagaggatcataatcagccataccacatttgtagaggttttacttgctttaaaaaacctcccacacctccccctgaacctgaaacataaaatgaatgcaattgttgttgttaacttgtttattgcagcttataatggttacaaataaagcaatagcatcacaaatttcacaaataaagcatttttttcactgcattctagttgtggtttgtccaaactcatcaatgtatcttatcatgtctggatccccatcaagctgatccggaacccttaatataacttcgtataatgtatgctatacgaagttattaggtccctcgacctgcagcccaagctagatcgaatttctagactcgagtggatccgccaccatgagtggtcccctagaaggggccgatgggggaggagaccccaggcccggagaacctttttgtcctggaggagtcccatcccctggggccccgcagcaccggccttgtccaggccccagcctggctgatgacactgatgcaaacagcaatggctcaagtggcaatgagtccaacggacccgagtccaggggcgcatctcagcggagttctcatagttcctcttctggcaatggcaaggactcagctctgctggagaccactgagagcagcaagagtacaaactcacagagcccatccccacccagcagctccattgcctacagcctcctgagtgcgagctcagagcaggacaacccatctaccagtggctgcagcagtgaacagtcagctcgagccaggacccagaaagaactcatgactgcacttcgggagctcaaacttcgactgccaccagagcgtcggggcaagggccgctctgggaccttggccacactgcagtacgctctggcctgtgtcaagcaggttcaggctaaccaggaatattaccagcagtggagtctggaggagggtgagccttgtgccatggacatgtctacttacaccctggaggaattggagcatatcacatccgaatacacacttcgaaaccaggacaccttctctgtggctgtgtccttcctgacaggccggattgtctatatttcggagcaggcaggtgtcctgctgcgttgcaaacgggatgtgtttcggggtgcccgcttctcagagctcctggctccccaggatgtgggtgtcttctatggctctactacaccatctcgactgcccacctggggcactggcacctctgcaggttcaggtctcaaggacttcacccaggaaaagtctgtcttctgccgaatcagaggaggtcctgaccgggatccagggcctcggtaccagccattccgcctaaccccatatgtgaccaagattcgggtctcagatggagcccctgcacagccgtgctgcctactcattgccgagcgcatccactctggttatgaagctccccggatccctcctgacaagaggatcttcaccacccgacacacaccaagctgcctcttccaggatgtagatgaaagggctgccccactgctgggttaccttccccaggatctcctgggggctccagtacttctctttctacatcctgaggaccgacccctcatgctggccattcataagaagatactgcagctggcaggccagccctttgaccattcccctattcgcttctgtgctcggaacggggaatatgtcaccatggacaccagctgggccggttttgtgcacccctggagccgcaaggtggctttcgtgttgggtcgccataaagtgcgcacggcacccctgaatgaggacgtcttcactcccccagcccccagcccagctccgtccctggactctgatatccaggagctctcagagcagatccatcgattgctgctgcagcctgtgcacagctccagccccacggggctctgtggagttggccctctgatgtcccctggtcctctacacagccctggctcctccagtgatagcaatgggggggacgctgaggggcctgggcctcctgctccagtgactttccagcagatctgtaaggatgtgcatctggtaaagcaccagggacaacagctcttcattgaatctcgggccaagcccccaccccggccccgcctccttgctacaggtacattcaaagccaaagtccttccctgccagtccccaaaccccgaactggaggtggccccagttcctgaccaagcctcgttagccttggcccctgaggagccagagaggaaagaaacctctggctgttcctaccagcagatcaactgcctggacagcatcctcaggtatttggagagctgcaacattcccagtacaaccaagcgtaaatgtgcctcctcctcctcctacactgcctcttcagcctctgatgatgacaagcagagggcaggtccagttcctgtgggggccaagaaagatccgtcgtcagcaatgctgtctggggagggggcaactcctcggaaggagccagtggtgggaggcaccctgagcccgctcgccctggcccttaagtttaaaccgctgatcagcctcgactgtgccttctagttgccagccatctgttgtttgcccctcccccgtgccttccttgaccctggaaggtgccactcccactgtcctttcctaataaaatgaggaaattgcatcgcattgtctgagtaggtgtcattctattctggggggtggggtggggcaggacagcaagggggaggattgggaagacaatagcaggcatgctggggatgcggtgggctctataattcacagtgtcgcgagttagactatgtaagcagaattttaatcatttttaaagagcccagtacttcatatccatttctcccgctccttctgcagccttatcaaaaggtattttagaacactcattttagccccattttcatttattatactggcttatccaacccctagacagagcattggcattttccctttcctgatcttagaagtctgatgactcatgaaaccagacagattagttacatacaccacaaatcgaggctgtagctggggcctcaacactgcagttcttttataactccttagtacactttttgttgatcctttgccttgatccttaattttcagtgtctatcacctctcccgtcaggtggtgttccacatttgggcctattctcagtccagggagttttacaacaatagatgtattgagaatccaacctaaagcttaactttccactcccatgaatgcctctctcctttttctccatttataaactgagctattaaccattaatggtttccaggtggatgtctcctccccc

SEQ ID NO: 313 - DNA, 3748 bp, synthetic construct; identical to SEQ ID NO: 312
  source 1..3748: mol_type = other DNA

SEQ ID NO: 314 - DNA, 3748 bp, synthetic construct; identical to SEQ ID NO: 312
  source 1..3748: mol_type = other DNA

SEQ ID NO: 315 - DNA, 4477 bp, synthetic construct
  source 1..4477: mol_type = other DNA
ggtggatggtcttcaaaggtgaaattccaaaagatcagtggatgaagaaatggtgggaaatgaagagagaaatagtgggggttgtagagcctgtacctcacgatgagacctactgtgaccccgcctcattgttccatgtttctaatgattattcattcatccggtactacactcggactctgtaccagttccaattccaagaagctttgtgtcaagccgcaaagcacgagggaccactgcataaatgtgacatatccaattcaactgaagccggacagaaactgttcaacatgcttaggcttgggaaaagcgaaccatggacacttgctctggaaaacgtcgtcggcgccaaaaatatgaacgtacgacctttgctcaactactttgagccattgtttacatggcttaaggatcaaaataagaactcatttgttggctggagcacagactggtctccttacgcagatcaatcaattaaggttaggatatcactcaagtccgctctgggagacaaggcctatgagtggaatgacaacgagatgtacctgtttagatcctctgtcgcttacgccatgaggcagtacttcttgaaggtgaagaatcaaatgatactttttggagaagaggacgtaagggttgccaacctcaagcctcgcatcagttttaattttttcgtgaccgcacctaaaaacgtatctgacattatccccagaacagaggtggagaaggctattcgaatgtccagatcccgaattaacgatgctttccgacttaatgataattccctcgagtttctgggtattcaaccaactctgggacctcctaatcaaccccccgtctctatatggcttatcgttttcggggttgtcatgggggttatagtagttgggatcgttattctgatctttaccggaataagagaccgaaaaaagaagaataaggctcgctctggggagaacccatacgcatccatagacattagtaagggagagaataatcctggattccagaatacagacgatgtgcaaaccagctttggaagcggagctactaacttcagcctgctgaagcaggctggagacgtggaggagaaccctggacctatggtgagcgagctgattaaggagaacatgcacatgaagctgtacatggagggcaccgtgaacaaccaccacttcaagtgcacatccgagggcgaaggcaagccctacgagggcacccagaccatgagaatcaaggcggtcgagggcggccctctccccttcgccttcgacatcctggctaccagcttcatgtacggcagcaaaaccttcatcaaccacacccagggcatccccgacttctttaagcagtccttccccgatggcttcacatgggagagagtcaccacatacgaagacgggggcgtgctgaccgctacccaggacaccagcctccaggacggctgcctcatctacaacgtcaagatcagaggggtgaacttcccatccaacggccctgtgatgcagaagaaaacactcggctgggaggcctccaccgagaccctgtaccccgctgacggcggcctggaaggcagagccgacatggccctgaagctcgtgggcgggggccacctgatctgcaacttgaagaccacatacagatccaagaaacccgctaagaacctcaagatgcccggcgtctactatgtggacagaagactggaaagaatcaaggaggccgacaaagagacctacgtcgagcagcacgaggtggctgtggccagatactgcgacctccctagcaaactggggcacagatgaaatcaacctctggattacaaaatttgtgaaagattgactggtattcttaactatgttgctccttttacgctatgtggatacgctgctttaatgcctttgtatcatgctattgcttcccgtatggctttcattttctcctccttgtataaatcctggttgctgtctctttatgaggagttgtggcccgttgtcaggcaacgtggcgtggtgtgcactgtgtttgctgacgcaacccccactggttggggcattgccaccacctgtcagctcctttccgggactttcgctttccccctccctattgccacggcggaactcatcgccgcctgccttgcccgctgctggacaggggctcggctgttgggcactgacaattccgtggtgttgtcggggaaatcatcgtcctttccttggctgctcgcctgtgttgccacctggattctgcgcgggacgtccttctgctacgtcccttcggccctcaatccagcggaccttccttcccgcggcctgctgccggctctgcggcctcttccgcgtcttcgccttcgccctcagacgagtcggatctccctttgggccgcctccccgcaaaccgctgatcagcctcgactgtgccttctagttgccagccatctgttgtttgcccctcccccgtgccttccttgaccctggaaggtgccactcccactgtcctttcctaataaaatgaggaaattgcatcgcattgtctgagtaggtgtcattctattctggggggtggggtggggcaggacagcaagggggaggattgggaagacaatagcaggcatgctggggatgcggtgggctctatagggaattagagctcacggggacagcccccccccaaagcccccagggatgtaattacgtccctcccccgctagggggcagcagcgagccgcccggggctccgctccggtccggcgctccccccgcatccccgagccggcagcgtgcggggacagcccgggcacggggaaggtggcacgggatcgctttcctctgaacgcttctcgctgctctttgagcctgcagacacctggggggatacggggaaaaagttttaggctgaaagagagatttagaatgacagaatcatagaacggcctgggttgcaaaggagcacagtgctcatccagatccaaccccctgctatgtgcagggtcatcaaccagcagcccaggctgcccagagccacatccagcctggccttgaatgcctgcagggatggggcatccacagcctccttgggcaacctgttcagtgcgtcaccaccctctgggggaaaaactgcctcctcatatccaacccaaacctcccctgtctcagtgtaaagccattcccccttgtcctatcaagggggagtttgctgtgacattgttggtctggggtgacacatgtttgccaattcagtgcatcacggagaggcagatcttggggataaggaagtgcaggacagcatggacgtgggacatgcaggtgttgagggctctgggacactctccaagtcacagcgttcagaacagccttaaggataagaagataggatagaaggacaaagagcaagttaaaacccagcatggagaggagcacaaaaaggccacagacactgctggtccctgtgtctgagcctgcatgtttgatggtgtctggatgcaagcagaaggggtggaagagcttgcctggagagatacagctgggtcagtaggactgggacaggcagctggagaattgccatgtagatgttcatacaatcgtcaaatcatgaaggctggaaaagccctccaagatccccaagaccaaccccaacccacccaccgtgcccactggccatgtccctcagtgccacatccccacagttcttcatcacctccagggacggtgacccccccacctccgtgggcagctgtgccactgcagcaccgctctttggagaaggtaaatcttgctaaatccagcccgaccctcccctggcacaacgtaaggccattatctctcatccaactccaggacggagtcagtgagaatattctatggctcacatctgtcattaactctagttccagtgcacctgacaccgtcttctggcctctgcagtgaccaagcacatgggtagtatgtagacatatacataagcaaaacacacatcattaaaaagtgacatttcccaaaggaagctgaagaaccagttcttgagaagatagtagaaatcagaaggggaaatagtagacatacagagggactgaccaggttgtgtcacctttataggctaggctaatggatgatcgacactagcgctctttgtgaaggacacacaaatgagacatagtttataggactaaacacacttctaagcaatttaatgagacttaagaccctgtctctagcaaatactctggatgatattcagctcaaggctcttgtcagacatgtttccattttcaaggtgagctaactggccaaaactgccaacaacctgtagtgaatagagaagatgagaaaatctggattctcaaatgacctaatgaaagccactggagcgccatatggtttctgtgaaaatgccttttcaatcattaacctcttaaatgagtgttagcatcctaactaatgagtggtgcagaatagtgggtctgcttagcttaactaaggcc

SEQ ID NO: 316 - DNA, 2923 bp, synthetic construct
  source 1..2923: mol_type = other DNA
gctgggccggttttgtgcacccctggagccgcaaggtggctttcgtgttgggtcgccataaagtgcgcacggcacccctgaatgaggacgtcttcactcccccagcccccagcccagctccgtccctggactctgatatccaggagctctcagagcagatccatcgattgctgctgcagcctgtgcacagctccagccccacggggctctgtggagttggccctctgatgtcccctggtcctctacacagccctggctcctccagtgatagcaatgggggggacgctgaggggcctgggcctcctgctccagtgactttccagcagatctgtaaggatgtgcatctggtaaagcaccagggacaacagctcttcattgaatctcgggccaagcccccaccccggccccgcctccttgctacaggtacattcaaagccaaagtccttccctgccagtccccaaaccccgaactggaggtggccccagttcctgaccaagcctcgttagccttggcccctgaggagccagagaggaaagaaacctctggctgttcctaccagcagatcaactgcctggacagcatcctcaggtatttggagagctgcaacattcccagtacaaccaagcgtaaatgtgcctcctcctcctcctacactgcctcttcagcctctgatgatgacaagcagagggcaggtccagttcctgtgggggccaagaaagatccgtcgtcagcaatgctgtctggggagggggcaactcctcggaaggagccagtggtgggaggcaccctgagcccgctcgccctggccaataaggcagagagcgtggtgtccgtcaccagtcagtgtagcttcagctccaccatcgtccatgtgggagacaagaagcccccggagtcggacatcatcatgatggaagacctgcctggcctggcccctggcccagcccccagtccggcccccagccccacagtagcccctgacccaaccccagatgcttatcgcccagtgggtctgaccaaggccgtgctgtccctgcacacacagaaggaagagcaagccttcctcaaccgcttcagagatcttggcaggcttcgtggacttgacacctcttctgtggccccctcagcccctggctgccaccatggccccattccccctggtcgccgacaccactgccgatctaaagcaaagcgttcccgccaccaccaccaccagaccccccggcccgaaactccctgctatgtctcccatccttcacctgtgccctcttctggaccctggccacccccaccagccacgacccccttcccagcaatggtccagccctacccactcccagtattctcccctcgaggaggaccccagccccttccccctgcccctacatctgtgtcccctgctaccttcccttctcccttagtgaccccaatggtggccttggtgctccctaactatctattccctaccccacctagttatccatatggggtgtcccaggcccctgttgaggggccacccacgcctgcttcccactcgccctctccatccctgcccccaccacctctcagccccccccaccgcccagactccccactgttcaactcgagatgcagctccccactccagctcaatctgctgcagcttgaggagtccccccgcacggaggggggcgctgctgcaggaggcccaggaagcagtgctgggcccctgcctcccagtgaggagactgctgagccagaggccagattggtggaggttactgagtcgtccaatcaggatgcactttcaggctccagcgacctgctggagctactgctccaagaagactctcgctcgggcacaggctccgcagcctcaggctccctgggctctggcctgggctctgggtctggttcaggatcccacgaagggggaagcacctcagccagcatcacccgcagcagtcagagcagccatacaagcaagtactttggcagcatcgactcttccgaggctgaagctggggctgctcgggccaggactgagcctggggaccaggtcattaagtgtgtgctccaggaccccatctggctgctcatggccaatgccgaccagcgtgtcatgatgacataccaggtgccgtagcttaagtttaaaccgctgatcagcctcgactgtgccttctagttgccagccatctgttgtttgcccctcccccgtgccttccttgaccctggaaggtgccactcccactgtcctttcctaataaaatgaggaaattgcatcgcattgtctgagtaggtgtcattctattctggggggtggggtggggcaggacagcaagggggaggattgggaagacaatagcaggcatgctggggatgcggtgggctctataattcacagtgtcgcgagttagactatgtaagcagaattttaatcatttttaaagagcccagtacttcatatccatttctcccgctccttctgcagccttatcaaaaggtattttagaacactcattttagccccattttcatttattatactggcttatccaacccctagacagagcattggcattttccctttcctgatcttagaagtctgatgactcatgaaaccagacagattagttacatacaccacaaatcgaggctgtagctggggcctcaacactgcagttcttttataactccttagtacactttttgttgatcctttgccttgatccttaattttcagtgtctatcacctctcccgtcaggtggtgttccacatttgggcctattctcagtccagggagttttacaacaatagatgtattgagaatccaacctaaagcttaactttccactcccatgaatgcctctctcctttttctccatttataaactgagctattaaccattaatggtttccaggtggatgtctcctccccc

SEQ ID NO: 317 - DNA, 3355 bp, synthetic construct
  source 1..3355: mol_type = other DNA
gctgggccggttttgtgcacccctggagccgcaaggtggctttcgtgttgggtcgccataaagtgcgcacggcacccctgaatgaggacgtcttcactcccccagcccccagcccagctccgtccctggactctgatatccaggagctctcagagcagatccatcgattgctgctgcagcctgtgcacagctccagccccacggggctctgtggagttggccctctgatgtcccctggtcctctacacagccctggctcctccagtgatagcaatgggggggacgctgaggggcctgggcctcctgctccagtgactttccagcagatctgtaaggatgtgcatctggtaaagcaccagggacaacagctcttcattgaatctcgggccaagcccccaccccggccccgcctccttgctacaggtacattcaaagccaaagtccttccctgccagtccccaaaccccgaactggaggtggccccagttcctgaccaagcctcgttagccttggcccctgaggagccagagaggaaagaaacctctggctgttcctaccagcagatcaactgcctggacagcatcctcaggtatttggagagctgcaacattcccagtacaaccaagcgtaaatgtgcctcctcctcctcctacactgcctcttcagcctctgatgatgacaagcagagggcaggtccagttcctgtgggggccaagaaagatccgtcgtcagcaatgctgtctggggagggggcaactcctcggaaggagccagtggtgggaggcaccctgagcccgctcgccctggccaataaggcagagagcgtggtgtccgtcaccagtcagtgtagcttcagctccaccatcgtccatgtgggagacaagaagcccccggagtcggacatcatcatgatggaagacctgcctggcctggcccctggcccagcccccagtccggcccccagccccacagtagcccctgacccaaccccagatgcttatcgcccagtgggtctgaccaaggccgtgctgtccctgcacacacagaaggaagagcaagccttcctcaaccgcttcagagatcttggcaggcttcgtggacttgacacctcttctgtggccccctcagcccctggctgccaccatggccccattccccctggtcgccgacaccactgccgatctaaagcaaagcgttcccgccaccaccaccaccagaccccccggcccgaaactccctgctatgtctcccatccttcacctgtgccctcttctggaccctggccacccccaccagccacgacccccttcccagcaatggtccagccctacccactcccagtattctcccctcgaggaggaccccagccccttccccctgcccctacatctgtgtcccctgctaccttcccttctcccttagtgaccccaatggtggccttggtgctccctaactatctattccctaccccacctagttatccatatggggtgtcccaggcccctgttgaggggccacccacgcctgcttcccactcgccctctccatccctgcccccaccacctctcagccccccccaccgcccagactccccactgttcaactcgagatgcagctccccactccagctcaatctgctgcagcttgaggagtccccccgcacggaggggggcgctgctgcaggaggcccaggaagcagtgctgggcccctgcctcccagtgaggagactgctgagccagaggccagattggtggaggttactgagtcgtccaatcaggatgcactttcaggctccagcgacctgctggagctactgctccaagaagactctcgctcgggcacaggctccgcagcctcaggctccctgggctctggcctgggctctgggtctggttcaggatcccacgaagggggaagcacctcagccagcatcacccgcagcagtcagagcagccatacaagcaagtactttggcagcatcgactcttccgaggctgaagctggggctgctcgggccaggactgagcctggggaccaggtcattaagtgtgtgctccaggaccccatctggctgctcatggccaatgccgaccagcgtgtcatgatgacataccaggtgccgtccagggatgcagcctctgtgctgaagcaagaccgggagaggctccgggccatgcagaaacagcagccacggttctcagaggaccagaggcgggaactgggtgctgtgcactcctgggtccggaagggccagctgcctcgggcccttgatgtgacggcgtgtgtggactgtggcagcagcgttcaagatcctggccactctgatgaccccctcttctcagaactggatggattggggctggagcccatggaagagggtggaggcgagggtggtgggtgtggtgttggcggtggtgggggtgatggtggtgaggaggcccagacccaaattggggctaagggttcaagctctcaggactctgccatggaggaagaagagcaaggtgggggctcatccagcccagctttacctgcagaagaaaacagcaccagctagcttaagtttaaaccgctgatcagcctcgactgtgccttctagttgccagccatctgttgtttgcccctcccccgtgccttccttgaccctggaaggtgccactcccactgtcctttcctaataaaatgaggaaattgcatcgcattgtctgagtaggtgtcattctattctggggggtggggtggggcaggacagcaagggggaggattgggaagacaatagcaggcatgctggggatgcggtgggctctataattcacagtgtcgcgagttagactatgtaagcagaattttaatcatttttaaagagcccagtacttcatatccatttctcccgctccttctgcagccttatcaaaaggtattttagaacactcattttagccccattttcatttattatactggcttatccaacccctagacagagcattggcattttccctttcctgatcttagaagtctgatgactcatgaaaccagacagattagttacatacaccacaaatcgaggctgtagctggggcctcaacactgcagttcttttataactccttagtacactttttgttgatcctttgccttgatccttaattttcagtgtctatcacctctcccgtcaggtggtgttccacatttgggcctattctcagtccagggagttttacaacaatagatgtattgagaatccaacctaaagcttaactttccactcccatgaatgcctctctcctttttctccatttataaactgagctattaaccattaatggtttccaggtggatgtctcctccccc

SEQ ID NO: 318 - DNA, 3301 bp, synthetic construct
  source 1..3301: mol_type = other DNA
gctgggccggttttgtgcacccctggagccgcaaggtggctttcgtgttgggtcgccataaagtgcgcacggcacccctgaatgaggacgtcttcactcccccagcccccagcccagctccgtccctggactctgatatccaggagctctcagagcagatccatcgattgctgctgcagcctgtgcacagctccagccccacggggctctgtggagttggccctctgatgtcccctggtcctctacacagccctggctcctccagtgatagcaatgggggggacgctgaggggcctgggcctcctgctccagtgactttccagcagatctgtaaggatgtgcatctggtaaagcaccagggacaacagctcttcattgaatctcgggccaagcccccaccccggccccgcctccttgctacaggtacattcaaagccaaagtccttccctgccagtccccaaaccccgaactggaggtggccccagttcctgaccaagcctcgttagccttggcccctgaggagccagagaggaaagaaacctctggctgttcctaccagcagatcaactgcctggacagcatcctcaggtatttggagagctgcaacattcccagtacaaccaagcgtaaatgtgcctcctcctcctcctacactgcctcttcagcctctgatgatgacaagcagagggcaggtccagttcctgtgggggccaagaaagatccgtcgtcagcaatgctgtctggggagggggcaactcctcggaaggagccagtggtgggaggcaccctgagcccgctcgccctggccaataaggcagagagcgtggtgtccgtcaccagtcagtgtagcttcagctccaccatcgtccatgtgggagacaagaagcccccggagtcggacatcatcatgatggaagacctgcctggcctggcccctggcccagcccccagtccggcccccagccccacagtagcccctgacccaaccccagatgcttatcgcccagtgggtctgaccaaggccgtgctgtccctgcacacacagaaggaagagcaagccttcctcaaccgcttcagagatcttggcaggcttcgtggacttgacacctcttctgtggccccctcagcccctggctgccaccatggccaccaccaccaccagaccccccggcccgaaactccctgctatgtctcccatccttcacctgtgccctcttctggaccctggccacccccaccagccacgacccccttcccagcaatggtccagccctacccactcccagtattctcccctcgaggaggaccccagccccttccccctgcccctacatctgtgtcccctgctaccttcccttctcccttagtgaccccaatggtggccttggtgctccctaactatctattccctaccccacctagttatccatatggggtgtcccaggcccctgttgaggggccacccacgcctgcttcccactcgccctctccatccctgcccccaccacctctcagccccccccaccgcccagactccccactgttcaactcgagatgcagctccccactccagctcaatctgctgcagcttgaggagtccccccgcacggaggggggcgctgctgcaggaggcccaggaagcagtgctgggcccctgcctcccagtgaggagactgctgagccagaggccagattggtggaggttactgagtcgtccaatcaggatgcactttcaggctccagcgacctgctggagctactgctccaagaagactctcgctcgggcacaggctccgcagcctcaggctccctgggctctggcctgggctctgggtctggttcaggatcccacgaagggggaagcacctcagccagcatcacccgcagcagtcagagcagccatacaagcaagtactttggcagcatcgactcttccgaggctgaagctggggctgctcgggccaggactgagcctggggaccaggtcattaagtgtgtgctccaggaccccatctggctgctcatggccaatgccgaccagcgtgtcatgatgacataccaggtgccgtccagggatgcagcctctgtgctgaagcaagaccgggagaggctccgggccatgcagaaacagcagccacggttctcagaggaccagaggcgggaactgggtgctgtgcactcctgggtccggaagggccagctgcctcgggcccttgatgtgacggcgtgtgtggactgtggcagcagcgttcaagatcctggccactctgatgaccccctcttctcagaactggatggattggggctggagcccatggaagagggtggaggcgagggtggtgggtgtggtgttggcggtggtgggggtgatggtggtgaggaggcccagacccaaattggggctaagggttcaagctctcaggactctgccatggaggaagaagagcaaggtgggggctcatccagcccagctttacctgcagaagaaaacagcaccagctagcttaagtttaaaccgctgatcagcctcgactgtgccttctagttgccagccatctgttgtttgcccctcccccgtgccttccttgaccctggaaggtgccactcccactgtcctttcctaataaaatgaggaaattgcatcgcattgtctgagtaggtgtcattctattctggggggtggggtggggcaggacagcaagggggaggattgggaagacaatagcaggcatgctggggatgcggtgggctctataattcacagtgtcgcgagttagactatgtaagcagaattttaatcatttttaaagagcccagtacttcatatccatttctcccgctccttctgcagccttatcaaaaggtattttagaacactcattttagccccattttcatttattatactggcttatccaacccctagacagagcattggcattttccctttcctgatcttagaagtctgatgactcatgaaaccagacagattagttacatacaccacaaatcgaggctgtagctggggcctcaacactgcagttcttttataactccttagtacactttttgttgatcctttgccttgatccttaattttcagtgtctatcacctctcccgtcaggtggtgttccacatttgggcctattctcagtccagggagttttacaacaatagatgtattgagaatccaacctaaagcttaactttccactcccatgaatgcctctctcctttttctccatttataaactgagctattaaccattaatggtttccaggtggatgtctcctccccc

SEQ ID NO: 319 - DNA, 52 bp, synthetic construct
  source 1..52: mol_type = other DNA
cactctttccctacacgacgctcttccgatctgctacagagcaggtaatgcc

SEQ ID NO: 320 - DNA, 55 bp, synthetic construct
  source 1..55: mol_type = other DNA
gtgactggagttcagacgtgtgctcttccgatcttgtttttgtggggtggctgac

SEQ ID NO: 321 - DNA, 52 bp, synthetic construct
  source 1..52: mol_type = other DNA
cactctttccctacacgacgctcttccgatctgccatgtagagagagcgcat

SEQ ID NO: 322 - DNA, 54 bp, synthetic construct
  source 1..54: mol_type = other DNA
gtgactggagttcagacgtgtgctcttccgatctatggagaaaggctggtgctc

SEQ ID NO: 323 - DNA, 52 bp, synthetic construct
  source 1..52: mol_type = other DNA
cactctttccctacacgacgctcttccgatcttggctgggaaggacatcatc

SEQ ID NO: 324 - DNA, 54 bp, synthetic construct
  source 1..54: mol_type = other DNA
gtgactggagttcagacgtgtgctcttccgatctcacagcctaccactggagtt

SEQ ID NO: 325 - DNA, 52 bp, synthetic construct
  source 1..52: mol_type = other DNA
cactctttccctacacgacgctcttccgatcttctccattgtcaaccctgcc

SEQ ID NO: 326 - DNA, 54 bp, synthetic construct
  source 1..54: mol_type = other DNA
gtgactggagttcagacgtgtgctcttccgatctcagcagtcccaggtagaagc

SEQ ID NO: 327 - DNA, 21 bp, synthetic construct
  source 1..21: mol_type = other DNA
tcctacagctcctgggcaacg

SEQ ID NO: 328 - DNA, 21 bp, synthetic construct
  source 1..21: mol_type = other DNA
gcattgccaggtcctgggaac

SEQ ID NO: 329 - DNA, 24 bp, synthetic construct
  source 1..24: mol_type = other DNA
acctccctgactcgagcttattcc

SEQ ID NO: 330 - DNA, 24 bp, synthetic construct
  source 1..24: mol_type = other DNA
cccacagtgtcaaaagacccaacc

SEQ ID NO: 331 - DNA, 24 bp, synthetic construct
  source 1..24: mol_type = other DNA
gtggcgaaggtaatgtctttggtg

SEQ ID NO: 332 - DNA, 20 bp, synthetic construct
  source 1..20: mol_type = other DNA
cagaacgtggggctcacctc

SEQ ID NO: 333 - DNA, 24 bp, synthetic construct
  source 1..24: mol_type = other DNA
accgtaagttatgtaacgcggaac

SEQ ID NO: 334 - DNA, 19 bp, synthetic construct
  source 1..19: mol_type = other DNA
ctcctggcttctgaggacc

SEQ ID NO: 335 - DNA, 21 bp, synthetic construct
  source 1..21: mol_type = other DNA
gcattgccaggtcctgggaac

SEQ ID NO: 336 - DNA, 21 bp, synthetic construct
  source 1..21: mol_type = other DNA
cgtctcgtcgctgattggctt

SEQ ID NO: 337 - DNA, 24 bp, synthetic construct
  source 1..24: mol_type = other DNA
gtggcgaaggtaatgtctttggtg

SEQ ID NO: 338 - DNA, 24 bp, synthetic construct
  source 1..24: mol_type = other DNA
accgtaagttatgtaacgcggaac

SEQ ID NO: 339 - DNA, 20 bp, synthetic construct
  source 1..20: mol_type = other DNA
ggttcggcttctggcgtgtg

SEQ ID NO: 340 - DNA, 24 bp, synthetic construct
  source 1..24: mol_type = other DNA
tcctccaggacaaaaaggttctcc

SEQ ID NO: 341 - DNA, 22 bp, synthetic construct
  source 1..22: mol_type = other DNA
caggccagccctttgaccattc

SEQ ID NO: 342 - DNA, 24 bp, synthetic construct
  source 1..24: mol_type = other DNA
ccaggcaggtcttccatcatgatg

SEQ ID NO: 343 - DNA, 23 bp, synthetic construct
  source 1..23: mol_type = other DNA
ggattgggaagacaatagcaggc

SEQ ID NO: 344 - DNA, 24 bp, synthetic construct
  source 1..24: mol_type = other DNA
cccacagtgtcaaaagacccaacc

SEQ ID NO: 345 - DNA, 24 bp, synthetic construct
  source 1..24: mol_type = other DNA
gtggcgaaggtaatgtctttggtg

SEQ ID NO: 346 - DNA, 24 bp, synthetic construct
  source 1..24: mol_type = other DNA
tcctccaggacaaaaaggttctcc

SEQ ID NO: 347 - DNA, 23 bp, synthetic construct
  source 1..23: mol_type = other DNA
cctggggaccaggtcattaagtg

SEQ ID NO: 348 - DNA, 24 bp, synthetic construct
  source 1..24: mol_type = other DNA
cccacagtgtcaaaagacccaacc

SEQ ID NO: 349 - DNA, 20 bp, synthetic construct
  source 1..20: mol_type = other DNA
tggccaactccatcactagg

SEQ ID NO: 350 - DNA, 22 bp, synthetic construct
  source 1..22: mol_type = other DNA
tgcgaacctcatcactcgttgc

SEQ ID NO: 351 - DNA, 23 bp, synthetic construct
  source 1..23: mol_type = other DNA
cgggctctacttcatcgcattcc

SEQ ID NO: 352 - DNA, 20 bp, synthetic construct
  source 1..20: mol_type = other DNA
tggccaactccatcactagg

SEQ ID NO: 353 - DNA, 20 bp, synthetic construct
  source 1..20: mol_type = other DNA
tggataggaagtgcccagcc

SEQ ID NO: 354 - DNA, 21 bp, synthetic construct
  source 1..21: mol_type = other DNA
gctctcacagctgtttacccc

SEQ ID NO: 355 - DNA, 22 bp, synthetic construct
  source 1..22: mol_type = other DNA
gttacagaggtcataggccacc

SEQ ID NO: 356 - DNA, 19 bp, synthetic construct
  source 1..19: mol_type = other DNA
gtgcttcacgtaggccttg

SEQ ID NO: 357 - DNA, 23 bp, synthetic construct
  source 1..23: mol_type = other DNA
ggattgggaagacaatagcaggc

SEQ ID NO: 358 - DNA, 20 bp, synthetic construct
  source 1..20: mol_type = other DNA
gcaggtcgagggacctaata

SEQ ID NO: 359 - DNA, 20 bp, synthetic construct
  source 1..20: mol_type = other DNA
ccactttgagctctactggc

SEQ ID NO: 360 - DNA, 20 bp, synthetic construct
  source 1..20: mol_type = other DNA
cgtgaagaatgtgcgagacc

SEQ ID NO: 361 - DNA, 21 bp, synthetic construct
  source 1..21: mol_type = other DNA
ctcagtctgaagagcagagcc

SEQ ID NO: 362 - DNA, 22 bp, synthetic construct
  source 1..22: mol_type = other DNA
gcattctagttgtggtttgtcc

SEQ ID NO: 363 - DNA, 57 bp, synthetic construct
  source 1..57: mol_type = other DNA
cactctttccctacacgacgctcttccgatctatgcggagatgaggggcgatcaggg

SEQ ID NO: 364 - DNA, 59 bp, synthetic construct
  source 1..59: mol_type = other DNA
gtgactggagttcagacgtgtgctcttccgatctgctggggcactagcagttgcaggtc

SEQ ID NO: 365 - DNA, 23 bp, synthetic construct
  source 1..23: mol_type = other DNA
cctggggaccaggtcattaagtg

SEQ ID NO: 366 - DNA, 24 bp, synthetic construct
  source 1..24: mol_type = other DNA
cccacagtgtcaaaagacccaacc

SEQ ID NO: 367 - DNA, 21 bp, synthetic construct
  source 1..21: mol_type = other DNA
gccattgtcactttgcgctgc

SEQ ID NO: 368 - DNA, 21 bp, synthetic construct
  source 1..21: mol_type = other DNA
tggcagagtgtccagaccagg

SEQ ID NO: 369 - DNA, 21 bp, synthetic construct
  source 1..21: mol_type = other DNA
gccattgtcactttgcgctgc

SEQ ID NO: 370 - DNA, 19 bp, synthetic construct
  source 1..19: mol_type = other DNA
aagtggctttggtccgtct

SEQ ID NO: 371 - DNA, 21 bp, synthetic construct
  source 1..21: mol_type = other DNA
agcaatgctgtttcactggtt

SEQ ID NO: 372 - DNA, 22 bp, synthetic construct
  source 1..22: mol_type = other DNA
tggccgggaatcaagagtcacc

SEQ ID NO: 373 - DNA, 22 bp, synthetic construct
  source 1..22: mol_type = other DNA
gtgttgttccattccatcacgg

SEQ ID NO: 374 - DNA, 22 bp, synthetic construct
  source 1..22: mol_type = other DNA
tggccgggaatcaagagtcacc

SEQ ID NO: 375 - DNA, 21 bp, synthetic construct
  source 1..21: mol_type = other DNA
agcaatgctgtttcactggtt

SEQ ID NO: 376 - DNA, 19 bp, synthetic construct
  source 1..19: mol_type = other DNA
aagtggctttggtccgtct

SEQ ID NO: 377 - DNA, 120 bp, synthetic construct
  source 1..120: mol_type = other DNA
gatgatgcatgccatcacaatctgtgctaaaagctggctcagcactgagtggcttattttaaaagcacattgtttgtgtggagtcactgagaaaagcaatatggaaattaaagtattttg

SEQ ID NO: 378 - DNA, 120 bp, synthetic construct
  source 1..120: mol_type = other DNA
gagttggaggctggcctggtctatatagcacatttgaggacagccagaactatatagtgagaatttgtctcaaaactaacaaaacgaacaaacaagcaaacaactctcaaactctggagc

SEQ ID NO: 379 - DNA, 120 bp, synthetic construct
  source 1..120: mol_type = other DNA
ggagtgcaggtggaaaccatctccccaggagacgggcgcaccttccccaagcgcggccagacctgcgtggtgcactacaccgggatgcttgaagatggaaagaaagttgattcctcccgg

SEQ ID NO: 380 - DNA, 120 bp, synthetic construct
  source 1..120: mol_type = other DNA
tcgcgcgtttcggtgatgacggtgaaaacctctgacacatgcagctcccggagacggtcacagcttgtctgtaagcggatgccgggagcagacaagcccgtcagggcgcgtcagcgggtg

SEQ ID NO: 381 - DNA, 120 bp, synthetic construct
  source 1..120: mol_type = other DNA
cagcttgtctgtaagcggatgccgggagcagacaagcccgtcagggcgcgtcagcgggtgttggcgggtgtcggggctggcttaactatgcggcatcagagcagattgtactgagagtgc

SEQ ID NO: 382 - DNA, 120 bp, synthetic construct
  source 1..120: mol_type = other DNA
ttggcgggtgtcggggctggcttaactatgcggcatcagagcagattgtactgagagtgcaccatatgcggtgtgaaataccgcacagatgcgtaaggagaaaataccgcatcaggcgcc

SEQ ID NO: 383 - DNA, 120 bp, synthetic construct
  source 1..120: mol_type = other DNA
accatatgcggtgtgaaataccgcacagatgcgtaaggagaaaataccgcatcaggcgccattcgccattcaggctgcgcaactgttgggaagggcgatcggtgcgggcctcttcgctat

SEQ ID NO: 384 - DNA, 120 bp, synthetic construct
  source 1..120: mol_type = other DNA
attcgccattcaggctgcgcaactgttgggaagggcgatcggtgcgggcctcttcgctattacgccagctggcgaaagggggatgtgctgcaaggcgattaagttgggtaacgccagggt

SEQ ID NO: 385 - DNA, 120 bp, synthetic construct
  source 1..120: mol_type = other DNA
tacgccagctggcgaaagggggatgtgctgcaaggcgattaagttgggtaacgccagggttttcccagtcacgacgttgtaaaacgacggccagtgaattcctgcgcgctcgctcgctca

SEQ ID NO: 386 - DNA, 120 bp, synthetic construct
  source 1..120: mol_type = other DNA
tttcccagtcacgacgttgtaaaacgacggccagtgaattcctgcgcgctcgctcgctcactgaggccgcccgggcaaagcccgggcgtcgggcgacctttggtcgcccggcctcagtga

SEQ ID NO: 387 - DNA, 120 bp, synthetic construct
  source 1..120: mol_type = other DNA
ctgaggccgcccgggcaaagcccgggcgtcgggcgacctttggtcgcccggcctcagtgagcgagcgagcgcgcagagagggagtggccaactccatcactaggggttcctcccaggcag

SEQ ID NO: 388 - DNA, 120 bp, synthetic construct
  source 1..120: mol_type = other DNA
gcgagcgagcgcgcagagagggagtggccaactccatcactaggggttcctcccaggcaggagatgagaaagcctgtggtaacgaggccacacctatggctctctgagatgtgactgcaa

SEQ ID NO: 389 - DNA, 120 bp, synthetic construct
  source 1..120: mol_type = other DNA
gagatgagaaagcctgtggtaacgaggccacacctatggctctctgagatgtgactgcaatgcttgtttatgtgaagtaggctccacagccttgggatgaagctcatctgtaggatacat

SEQ ID NO: 390 - DNA, 120 bp, synthetic construct
  source 1..120: mol_type = other DNA
tgcttgtttatgtgaagtaggctccacagccttgggatgaagctcatctgtaggatacatttctagcattcgtgaagttcttggttataccccagtaccatataaaccacatgtggtagt

SEQ ID NO: 391 - DNA, 120 bp, synthetic construct
  source 1..120: mol_type = other DNA
ttctagcattcgtgaagttcttggttataccccagtaccatataaaccacatgtggtagttcgtgcctctgatctcaaactggggagagggaggcgggggaattagaagttgaaggtcat

SEQ ID NO: 392 - DNA, 120 bp, synthetic construct
  source 1..120: mol_type = other DNA
tcgtgcctctgatctcaaactggggagagggaggcgggggaattagaagttgaaggtcatccttgactacatactgactgagttcaaggtcatcttgggtaacttaaaacccaagagact

SEQ ID NO: 393 - DNA, 120 bp, synthetic construct
  source 1..120: mol_type = other DNA
ccttgactacatactgactgagttcaaggtcatcttgggtaacttaaaacccaagagactgaggagggatgcatagcttttcttagcccgttctgtgcctactggggcccaccgggggct

SEQ ID NO: 394 - DNA, 120 bp, synthetic construct
  source 1..120: mol_type = other DNA
gaggagggatgcatagcttttcttagcccgttctgtgcctactggggcccaccgggggctttgagttctcactggttctgttccgtggaccactgtctaccctcagggtactacgccctt

SEQ ID NO: 395 - DNA, 120 bp, synthetic construct
  source 1..120: mol_type = other DNA
ttgagttctcactggttctgttccgtggaccactgtctaccctcagggtactacgcccttgaggactgtgtccaaagactactgtgcacttctctttttctcagtttcttcttagaattc

SEQ ID NO: 396 - DNA, 120 bp, synthetic construct
  source 1..120: mol_type = other DNA
gaggactgtgtccaaagactactgtgcacttctctttttctcagtttcttcttagaattccttgtattaactagaaaaaaaaaaaagaatgatagtgaattgggtcaccttcgtcaaaag

SEQ ID NO: 397 - DNA, 120 bp, synthetic construct
  source 1..120: mol_type = other DNA
cttgtattaactagaaaaaaaaaaaagaatgatagtgaattgggtcaccttcgtcaaaagccgtgggtttggttagctaaccacaggatgtgtgttgggagaccgtgggaattaggtaat

SEQ ID NO: 398 - DNA, 120 bp, synthetic construct
  source 1..120: mol_type = other DNA
ccgtgggtttggttagctaaccacaggatgtgtgttgggagaccgtgggaattaggtaataatagaaagtaccacacaccaaacacacacaccagtgtaagcactctaagcttgtatccc

SEQ ID NO: 399 - DNA, 120 bp, synthetic construct
  source 1..120: mol_type = other DNA
aatagaaagtaccacacaccaaacacacacaccagtgtaagcactctaagcttgtatccctgtggaaacggttctggtagtcatagccagtgtctcttgtggtttgggttctgcattgtg

SEQ ID NO: 400 - DNA, 120 bp, synthetic construct
  source 1..120: mol_type = other DNA
tgtggaaacggttctggtagtcatagccagtgtctcttgtggtttgggttctgcattgtgactctcccgtctttgtgggccccaggtacttctccatacacttcccagaactctgaaggg

SEQ ID NO: 401 - DNA, 120 bp, synthetic construct
  source 1..120: mol_type = other DNA
actctcccgtctttgtgggccccaggtacttctccatacacttcccagaactctgaaggggtgcagacatggtgagcaagggcgaggaggataacatggccatcatcaaggagttcatgc

SEQ ID NO: 402 - DNA, 120 bp, synthetic construct
  source 1..120: mol_type = other DNA
gtgcagacatggtgagcaagggcgaggaggataacatggccatcatcaaggagttcatgcgcttcaaggtgcacatggagggctccgtgaacggccacgagttcgagatcgagggcgagg

SEQ ID NO: 403 - DNA, 120 bp, synthetic construct
  source 1..120: mol_type = other DNA
gcttcaaggtgcacatggagggctccgtgaacggccacgagttcgagatcgagggcgagggcgagggccgcccctacgagggcacccagaccgccaagctgaaggtgaccaagggcggcc

SEQ ID NO: 404 - DNA, 120 bp, synthetic construct
  source 1..120: mol_type = other DNA
gcgagggccgcccctacgagggcacccagaccgccaagctgaaggtgaccaagggcggccccctgcccttcgcctgggacatcctgtcccctcagttcatgtacggctccaaggcctacg

SEQ ID NO: 405 - DNA, 120 bp, synthetic construct
  source 1..120: mol_type = other DNA
ccctgcccttcgcctgggacatcctgtcccctcagttcatgtacggctccaaggcctacgtgaagcaccccgccgacatccccgactacttgaagctgtccttccccgagggcttcaagt

SEQ ID NO: 406 - DNA, 120 bp, synthetic construct
  source 1..120: mol_type = other DNA
tgaagcaccccgccgacatccccgactacttgaagctgtccttccccgagggcttcaagtgggagcgcgtgatgaacttcgaggacggcggcgtggtgaccgtgacccaggactcctccc

SEQ ID NO: 407 - DNA, 120 bp, synthetic construct
  source 1..120: mol_type = other DNA
gggagcgcgtgatgaacttcgaggacggcggcgtggtgaccgtgacccaggactcctccctgcaggacggcgagttcatctacaaggtgaagctgcgcggcaccaacttcccctccgacg

SEQ ID NO: 408 - DNA, 120 bp, synthetic construct
  source 1..120: mol_type = other DNA
tgcaggacggcgagttcatctacaaggtgaagctgcgcggcaccaacttcccctccgacggccccgtaatgcagaagaagaccatgggctgggaggcctcctccgagcggatgtaccccg

SEQ ID NO: 409 - DNA, 120 bp, synthetic construct
  source 1..120: mol_type = other DNA
gccccgtaatgcagaagaagaccatgggctgggaggcctcctccgagcggatgtaccccgaggacggcgccctgaagggcgagatcaagcagaggctgaagctgaaggacggcggccact

SEQ ID NO: 410 - DNA, 120 bp, synthetic construct
  source 1..120: mol_type = other DNA
aggacggcgccctgaagggcgagatcaagcagaggctgaagctgaaggacggcggccactacgacgccgaggtcaagaccacctacaaggccaagaagcccgtgcagctgcccggcgcct

SEQ ID NO: 411 - DNA, 120 bp, synthetic construct
  source 1..120: mol_type = other DNA
acgacgccgaggtcaagaccacctacaaggccaagaagcccgtgcagctgcccggcgcctacaacgtcaacatcaagctggacatcacctcccacaacgaggactacaccatcgtggaac

SEQ ID NO: 412 - DNA, 120 bp, synthetic construct
  source 1..120: mol_type = other DNA
acaacgtcaacatcaagctggacatcacctcccacaacgaggactacaccatcgtggaacagtacgagcgcgccgagggccgccactccaccggcggcatggacgagctgtacaagggag

SEQ ID NO: 413 - DNA, 120 bp, synthetic construct
  source 1..120: mol_type = other DNA
agtacgagcgcgccgagggccgccactccaccggcggcatggacgagctgtacaagggaggaggaggatcaggaggaggaggatcacctagggcgggaagtgctgtggacagcgccaacc

SEQ ID NO: 414 - DNA, 120 bp, synthetic construct
  source 1..120: mol_type = other DNA
gaggaggatcaggaggaggaggatcacctagggcgggaagtgctgtggacagcgccaaccacctgacctacttttttggcaacatcacccgggaagaggctgaagactacctggtccagg

SEQ ID NO: 415 - DNA, 120 bp, synthetic construct
  source 1..120: mol_type = other DNA
acctgacctacttttttggcaacatcacccgggaagaggctgaagactacctggtccagggaggcatgaccgatgggctctacctgctacgccagagccgcaattacctgggtggttttg

SEQ ID NO: 416 - DNA, 120 bp, synthetic construct
  source 1..120: mol_type = other DNA
gaggcatgaccgatgggctctacctgctacgccagagccgcaattacctgggtggttttgctttgtcggtggctcacaacaggaaggcacaccactacaccatcgagagggaacttaatg

SEQ ID NO: 417 - DNA, 120 bp, synthetic construct
  source 1..120: mol_type = other DNA
ctttgtcggtggctcacaacaggaaggcacaccactacaccatcgagagggaacttaatggcacctacgccatctccgggggcagggcccatgccagcccagcagacctctgccattacc

SEQ ID NO: 418 - DNA, 120 bp, synthetic construct
  source 1..120: mol_type = other DNA
gcacctacgccatctccgggggcagggcccatgccagcccagcagacctctgccattaccactcccaggaacctgatggccttatctgcctccttaagaagcccttcaaccggcccccgg

SEQ ID NO: 419 - DNA, 120 bp, synthetic construct
  source 1..120: mol_type = other DNA
actcccaggaacctgatggccttatctgcctccttaagaagcccttcaaccggcccccgggagtacagcccaagaccggaccctttgaggacctgaaggagaacctcatcagggaatatg

SEQ ID NO: 420 - DNA, 120 bp, synthetic construct
  source 1..120: mol_type = other DNA
gagtacagcccaagaccggaccctttgaggacctgaaggagaacctcatcagggaatatgtgaaacagacctggaaccttcaggtgagtctgctgggcttgagcccacagagttctctaa

SEQ ID NO: 421 - DNA, 120 bp, synthetic construct
  source 1..120: mol_type = other DNA
tgaaacagacctggaaccttcaggtgagtctgctgggcttgagcccacagagttctctaaacatattcagagcctgtgcctcctttacccaaagactaggatagcagatgcctgtgtgct

SEQ ID NO: 422 - DNA, 120 bp, synthetic construct
  source 1..120: mol_type = other DNA
acatattcagagcctgtgcctcctttacccaaagactaggatagcagatgcctgtgtgctgctgcccctcgctgcctctcttcccaccccatctgctcatgggaccaaagcggagtcctc

SEQ ID NO: 423 - DNA, 120 bp, synthetic construct
  source 1..120: mol_type = other DNA
gctgcccctcgctgcctctcttcccaccccatctgctcatgggaccaaagcggagtcctcacatcctctctgccctcctcctttcaccacgaaggagaaggttgtgttttaactttattc

SEQ ID NO: 424 - DNA, 120 bp, synthetic construct
  source 1..120: mol_type = other DNA
acatcctctctgccctcctcctttcaccacgaaggagaaggttgtgttttaactttattcctttgagtttttcttctttgaaagtccaactctggctattcattaccaagatctgttgtt

SEQ ID NO: 425 - DNA, 120 bp, synthetic construct
  source 1..120: mol_type = other DNA
ctttgagtttttcttctttgaaagtccaactctggctattcattaccaagatctgttgttctctcactaggaaggaaaagggaaccagccttctccacacttaatccatctccatgttgt

SEQ ID NO: 426 - DNA, 120 bp, synthetic construct
  source 1..120: mol_type = other DNA
ctctcactaggaaggaaaagggaaccagccttctccacacttaatccatctccatgttgttatttccaccttgtttcttcctggtccaggctgctggccagggcctcctctgaggaaccc

SEQ ID NO: 427 - DNA, 120 bp, synthetic construct
  source 1..120: mol_type = other DNA
tatttccaccttgtttcttcctggtccaggctgctggccagggcctcctctgaggaacccctagtgatggagttggccactccctctctgcgcgctcgctcgctcactgaggccgggcga

SEQ ID NO: 428 - DNA, 120 bp, synthetic construct
  source 1..120: mol_type = other DNA
ctagtgatggagttggccactccctctctgcgcgctcgctcgctcactgaggccgggcgaccaaaggtcgcccgacgcccgggctttgcccgggcggcctcagtgagcgagcgagcgcgc

SEQ ID NO: 429 - DNA, 120 bp, synthetic construct
  source 1..120: mol_type = other DNA
ccaaaggtcgcccgacgcccgggctttgcccgggcggcctcagtgagcgagcgagcgcgcagaagcttggcgtaatcatggtcatagctgtttcctgtgtgaaattgttatccgctcaca

SEQ ID NO: 430 - DNA, 120 bp, synthetic construct
  source 1..120: mol_type = other DNA
agaagcttggcgtaatcatggtcatagctgtttcctgtgtgaaattgttatccgctcacaattccacacaacatacgagccggaagcataaagtgtaaagcctggggtgcctaatgagtg

SEQ ID NO: 431 - DNA, 120 bp, synthetic construct
  source 1..120: mol_type = other DNA
attccacacaacatacgagccggaagcataaagtgtaaagcctggggtgcctaatgagtgagctaactcacattaattgcgttgcgctcactgcccgctttccagtcgggaaacctgtcg

SEQ ID NO: 432 - DNA, 120 bp, synthetic construct
  source 1..120: mol_type = other DNA
agctaactcacattaattgcgttgcgctcactgcccgctttccagtcgggaaacctgtcgtgccagctgcattaatgaatcggccaacgcgcggggagaggcggtttgcgtattgggcgc

SEQ ID NO: 433 - DNA, 120 bp, synthetic construct
  source 1..120: mol_type = other DNA
tgccagctgcattaatgaatcggccaacgcgcggggagaggcggtttgcgtattgggcgctcttccgcttcctcgctcactgactcgctgcgctcggtcgttcggctgcggcgagcggta

SEQ ID NO: 434 - DNA, 120 bp, synthetic construct
  source 1..120: mol_type = other DNA
tcttccgcttcctcgctcactgactcgctgcgctcggtcgttcggctgcggcgagcggtatcagctcactcaaaggcggtaatacggttatccacagaatcaggggataacgcaggaaag

SEQ ID NO: 435 - DNA, 120 bp, synthetic construct
  source 1..120: mol_type = other DNA
tcagctcactcaaaggcggtaatacggttatccacagaatcaggggataacgcaggaaagaacatgtgagcaaaaggccagcaaaaggccaggaaccgtaaaaaggccgcgttgctggcg

SEQ ID NO: 436 - DNA, 120 bp, synthetic construct
  source 1..120: mol_type = other DNA
aacatgtgagcaaaaggccagcaaaaggccaggaaccgtaaaaaggccgcgttgctggcgtttttccataggctccgcccccctgacgagcatcacaaaaatcgacgctcaagtcagagg

SEQ ID NO: 437 - DNA, 120 bp, synthetic construct
  source 1..120: mol_type = other DNA
tttttccataggctccgcccccctgacgagcatcacaaaaatcgacgctcaagtcagaggtggcgaaacccgacaggactataaagataccaggcgtttccccctggaagctccctcgtg

SEQ ID NO: 438 - DNA, 120 bp, synthetic construct
  source 1..120: mol_type = other DNA
tggcgaaacccgacaggactataaagataccaggcgtttccccctggaagctccctcgtgcgctctcctgttccgaccctgccgcttaccggatacctgtccgcctttctcccttcggga

SEQ ID NO: 439 - DNA, 120 bp, synthetic construct
  source 1..120: mol_type = other DNA
cgctctcctgttccgaccctgccgcttaccggatacctgtccgcctttctcccttcgggaagcgtggcgctttctcatagctcacgctgtaggtatctcagttcggtgtaggtcgttcgc

SEQ ID NO: 440 - DNA, 120 bp, synthetic construct
  source 1..120: mol_type = other DNA
agcgtggcgctttctcatagctcacgctgtaggtatctcagttcggtgtaggtcgttcgctccaagctgggctgtgtgcacgaaccccccgttcagcccgaccgctgcgccttatccggt

SEQ ID NO: 441 - DNA, 120 bp, synthetic construct
  source 1..120: mol_type = other DNA
tccaagctgggctgtgtgcacgaaccccccgttcagcccgaccgctgcgccttatccggtaactatcgtcttgagtccaacccggtaagacacgacttatcgccactggcagcagccact

SEQ ID NO: 442 - DNA, 120 bp, synthetic construct
  source 1..120: mol_type = other DNA
aactatcgtcttgagtccaacccggtaagacacgacttatcgccactggcagcagccactggtaacaggattagcagagcgaggtatgtaggcggtgctacagagttcttgaagtggtgg

SEQ ID NO: 443 - DNA, 120 bp, synthetic construct
  source 1..120: mol_type = other DNA
ggtaacaggattagcagagcgaggtatgtaggcggtgctacagagttcttgaagtggtggcctaactacggctacactagaagaacagtatttggtatctgcgctctgctgaagccagtt

SEQ ID NO: 444 - DNA, 120 bp, synthetic construct
  source 1..120: mol_type = other DNA
cctaactacggctacactagaagaacagtatttggtatctgcgctctgctgaagccagttaccttcggaaaaagagttggtagctcttgatccggcaaacaaaccaccgctggtagcggt

SEQ ID NO: 445 - DNA, 120 bp, synthetic construct
  source 1..120: mol_type = other DNA
accttcggaaaaagagttggtagctcttgatccggcaaacaaaccaccgctggtagcggtggtttttttgtttgcaagcagcagattacgcgcagaaaaaaaggatctcaagaagatcct

SEQ ID NO: 446 - DNA, 120 bp, synthetic construct
  source 1..120: mol_type = other DNA
ggtttttttgtttgcaagcagcagattacgcgcagaaaaaaaggatctcaagaagatcctttgatcttttctacggggtctgacgctcagtggaacgaaaactcacgttaagggattttg

SEQ ID NO: 447 - DNA, 120 bp, synthetic construct
  source 1..120: mol_type = other DNA
ttgatcttttctacggggtctgacgctcagtggaacgaaaactcacgttaagggattttggtcatgagattatcaaaaaggatcttcacctagatccttttaaattaaaaatgaagtttt

SEQ ID NO: 448 - DNA, 120 bp, synthetic construct
  source 1..120: mol_type = other DNA
gtcatgagattatcaaaaaggatcttcacctagatccttttaaattaaaaatgaagttttaaatcaatctaaagtatatatgagtaaacttggtctgacagttaccaatgcttaatcagt

SEQ ID NO: 449 - DNA, 120 bp, synthetic construct
  source 1..120: mol_type = other DNA
aaatcaatctaaagtatatatgagtaaacttggtctgacagttaccaatgcttaatcagtgaggcacctatctcagcgatctgtctatttcgttcatccatagttgcctgactccccgtc

SEQ ID NO: 450 - DNA, 120 bp, synthetic construct
  source 1..120: mol_type = other DNA
gaggcacctatctcagcgatctgtctatttcgttcatccatagttgcctgactccccgtcgtgtagataactacgatacgggagggcttaccatctggccccagtgctgcaatgataccg

SEQ ID NO: 451 - DNA, 120 bp, synthetic construct
  source 1..120: mol_type = other DNA
gtgtagataactacgatacgggagggcttaccatctggccccagtgctgcaatgataccgcgagacccacgctcaccggctccagatttatcagcaataaaccagccagccggaagggcc

SEQ ID NO: 452 - DNA, 120 bp, synthetic construct
  source 1..120: mol_type = other DNA
cgagacccacgctcaccggctccagatttatcagcaataaaccagccagccggaagggccgagcgcagaagtggtcctgcaactttatccgcctccatccagtctattaattgttgccgg

SEQ ID NO: 453 - DNA, 120 bp, synthetic construct
  source 1..120: mol_type = other DNA
gagcgcagaagtggtcctgcaactttatccgcctccatccagtctattaattgttgccgggaagctagagtaagtagttcgccagttaatagtttgcgcaacgttgttgccattgctaca

SEQ ID NO: 454 - DNA, 120 bp, synthetic construct
  source 1..120: mol_type = other DNA
gaagctagagtaagtagttcgccagttaatagtttgcgcaacgttgttgccattgctacaggcatcgtggtgtcacgctcgtcgtttggtatggcttcattcagctccggttcccaacga

SEQ ID NO: 455 - DNA, 120 bp, synthetic construct
  source 1..120: mol_type = other DNA
ggcatcgtggtgtcacgctcgtcgtttggtatggcttcattcagctccggttcccaacgatcaaggcgagttacatgatcccccatgttgtgcaaaaaagcggttagctccttcggtcct

SEQ ID NO: 456 - DNA, 120 bp, synthetic construct
  source 1..120: mol_type = other DNA
tcaaggcgagttacatgatcccccatgttgtgcaaaaaagcggttagctccttcggtcctccgatcgttgtcagaagtaagttggccgcagtgttatcactcatggttatggcagcactg

SEQ ID NO: 457 - DNA, 120 bp, synthetic construct
  source 1..120: mol_type = other DNA
ccgatcgttgtcagaagtaagttggccgcagtgttatcactcatggttatggcagcactgcataattctcttactgtcatgccatccgtaagatgcttttctgtgactggtgagtactca

SEQ ID NO: 458 - DNA, 120 bp, synthetic construct
  source 1..120: mol_type = other DNA
cataattctcttactgtcatgccatccgtaagatgcttttctgtgactggtgagtactcaaccaagtcattctgagaatagtgtatgcggcgaccgagttgctcttgcccggcgtcaata

SEQ ID NO: 459 - DNA, 120 bp, synthetic construct
  source 1..120: mol_type = other DNA
accaagtcattctgagaatagtgtatgcggcgaccgagttgctcttgcccggcgtcaatacgggataataccgcgccacatagcagaactttaaaagtgctcatcattggaaaacgttct

SEQ ID NO: 460 - DNA, 120 bp, synthetic construct
  source 1..120: mol_type = other DNA
cgggataataccgcgccacatagcagaactttaaaagtgctcatcattggaaaacgttcttcggggcgaaaactctcaaggatcttaccgctgttgagatccagttcgatgtaacccact

SEQ ID NO: 461 - DNA, 120 bp, synthetic construct
  source 1..120: mol_type = other DNA
tcggggcgaaaactctcaaggatcttaccgctgttgagatccagttcgatgtaacccactcgtgcacccaactgatcttcagcatcttttactttcaccagcgtttctgggtgagcaaaa

SEQ ID NO: 462 - DNA, 120 bp, synthetic construct
  source 1..120: mol_type = other DNA
cgtgcacccaactgatcttcagcatcttttactttcaccagcgtttctgggtgagcaaaaacaggaaggcaaaatgccgcaaaaaagggaataagggcgacacggaaatgttgaatactc

SEQ ID NO: 463 - DNA, 120 bp, synthetic construct
  source 1..120: mol_type = other DNA
acaggaaggcaaaatgccgcaaaaaagggaataagggcgacacggaaatgttgaatactcatactcttcctttttcaatattattgaagcatttatcagggttattgtctcatgagcgga

SEQ ID NO: 464 - DNA, 120 bp, synthetic construct
  source 1..120: mol_type = other DNA
atactcttcctttttcaatattattgaagcatttatcagggttattgtctcatgagcggatacatatttgaatgtatttagaaaaataaacaaataggggttccgcgcacatttccccga

SEQ ID NO: 465 - DNA, 120 bp, synthetic construct
  source 1..120: mol_type = other DNA
tacatatttgaatgtatttagaaaaataaacaaataggggttccgcgcacatttccccgaaaagtgccacctgacgtctaagaaaccattattatcatgacattaacctataaaaatagg

SEQ ID NO: 466 - DNA, 120 bp, synthetic construct
  source 1..120: mol_type = other DNA
aaaataaacaaataggggttccgcgcacatttccccgaaaagtgccacctgacgtctaagaaaccattattatcatgacattaacctataaaaataggcgtatcacgaggccctttcgtc

SEQ ID NO: 467 - DNA, 120 bp, synthetic construct
  source 1..120: mol_type = other DNA
ggtgtgtctgaagaccacaagtgtattcacattaaataaataaatcctccttcttcttcttttttttttttttaaagagaatactgtctccagtagaatttactgaagtaatgaaatact

SEQ ID NO: 468 - DNA, 120 bp, synthetic construct
  source 1..120: mol_type = other DNA
ttttaattattttgtgcagcgatgggggcggggggggggggggggcgcgcgccaggcggggcggggcggggcgaggggcggggcggggcgaggcggagaggtgcggcggcagccaatcag

SEQ ID NO: 469 - DNA, 120 bp, synthetic construct
  source 1..120: mol_type = other DNA
ccattactaaacatgaaagcaagtaatgataattttggatttcaaaaatgtagggccagagtttagccagccagtggtggtgcttgcctttatgcctttaatcccagcactctggaggca

SEQ ID NO: 470 - DNA, 120 bp, synthetic construct
  source 1..120: mol_type = other DNA
tcctaatttcaaattaaactgaaaaaaaaaaaaaaaaactagtttagccaaaagttgtaataaaattttattttacttatgatctaatttattgtagatatgtactcaataattactgac

SEQ ID NO: 471 - DNA, 120 bp, synthetic construct
  source 1..120: mol_type = other DNA
agtttagccaaaagttgtaataaaattttattttacttatgatctaatttattgtagatatgtactcaataattactgactactattgccttatgtttcaaagttccaccttcatcaaaa

SEQ ID NO: 472 - DNA, 120 bp, synthetic construct
  source 1..120: mol_type = other DNA
tactattgccttatgtttcaaagttccaccttcatcaaaagggtcagaataatttctaaagtatacaggcttctagatactaagcagtatcaagatgtaggcatttttaagtgtgtcagt

SEQ ID NO: 473 - DNA, 120 bp, synthetic construct
  source 1..120: mol_type = other DNA
gggtcagaataatttctaaagtatacaggcttctagatactaagcagtatcaagatgtaggcatttttaagtgtgtcagttcaagtaatccttctaagaaaaaagcctcttgatcttcca

SEQ ID NO: 474 - DNA, 120 bp, synthetic construct
  source 1..120: mol_type = other DNA
tcaagtaatccttctaagaaaaaagcctcttgatcttccagagattactgtaagaccacaatcagatccaaaaaaacaggaaataaaagtggtagtcattattttctaagggaacttgta

SEQ ID NO: 475 - DNA, 120 bp, synthetic construct
  source 1..120: mol_type = other DNA
gagattactgtaagaccacaatcagatccaaaaaaacaggaaataaaagtggtagtcattattttctaagggaacttgtatattataattaagctcaaaacacttgcaccttaactgtaa

SEQ ID NO: 476 - DNA, 120 bp, synthetic construct
  source 1..120: mol_type = other DNA
tattataattaagctcaaaacacttgcaccttaactgtaaataccttgaactgtaatatcagtatgagtgatatcatacttatgggatacagcacctaatctacgtaacaaaaatattat

SEQ ID NO: 477 - DNA, 120 bp, synthetic construct
  source 1..120: mol_type = other DNA
ataccttgaactgtaatatcagtatgagtgatatcatacttatgggatacagcacctaatctacgtaacaaaaatattattacaaccatctaaaacaatcattaacagagttttgtttta

SEQ ID NO: 478 - DNA, 120 bp, synthetic construct
  source 1..120: mol_type = other DNA
tacaaccatctaaaacaatcattaacagagttttgttttatggacttgcttttagcactggaaaaacaatatgaactacatttgtgaattcaaaatactctacaatgtttcttcattttt

SEQ ID NO: 479 - DNA, 120 bp, synthetic construct
  source 1..120: mol_type = other DNA
tggacttgcttttagcactggaaaaacaatatgaactacatttgtgaattcaaaatactctacaatgtttcttcattttttgctacaaattctagaaccattacatttatgggatctaaa

SEQ ID NO: 480 - DNA, 120 bp, synthetic construct
  source 1..120: mol_type = other DNA
tgctacaaattctagaaccattacatttatgggatctaaataaatttgtacaaaattaaacagactcccgaaggaaaaggcattggttgcagtaataatcctagggaggaaaaaccctac

SEQ ID NO: 481 - DNA, 120 bp, synthetic construct
  source 1..120: mol_type = other DNA
taaatttgtacaaaattaaacagactcccgaaggaaaaggcattggttgcagtaataatcctagggaggaaaaaccctacgattttatgtgctgcacatgcctgggtgatggttcagttt

SEQ ID NO: 482 - DNA, 120 bp, synthetic construct
  source 1..120: mol_type = other DNA
gattttatgtgctgcacatgcctgggtgatggttcagtttcaaatattccttgccagacaaactacttaaaaaggcttaatcaaagatcaccctggttctatttggttaggggtagggtg

SEQ ID NO: 483 - DNA, 120 bp, synthetic construct
  source 1..120: mol_type = other DNA
caaatattccttgccagacaaactacttaaaaaggcttaatcaaagatcaccctggttctatttggttaggggtagggtgggcttagaatggactcttgctgccttcttagtatcttgaa

SEQ ID NO: 484 - DNA, 120 bp, synthetic construct
  source 1..120: mol_type = other DNA
ggcttagaatggactcttgctgccttcttagtatcttgaactaaacttactcaatttctgaatattccttctgtgtctctgatggattactgccaaaacacatctttgttcggtggaaag

SEQ ID NO: 485 - DNA, 120 bp, synthetic construct
  source 1..120: mol_type = other DNA
ctaaacttactcaatttctgaatattccttctgtgtctctgatggattactgccaaaacacatctttgttcggtggaaagtctataatccaacacatacacgattaatccaatttatagg

SEQ ID NO: 486 - DNA, 120 bp, synthetic construct
  source 1..120: mol_type = other DNA
tctataatccaacacatacacgattaatccaatttataggtcagatatcagtaagtatatctaatctggagaggtctacagattaatttagaattaacaacaaaccaagcattaatccaa

SEQ ID NO: 487 - DNA, 120 bp, synthetic construct
  source 1..120: mol_type = other DNA
tcagatatcagtaagtatatctaatctggagaggtctacagattaatttagaattaacaacaaaccaagcattaatccaaaagcagctctttttagtttaggcatccaaatatatagtaa

SEQ ID NO: 488 - DNA, 120 bp, synthetic construct
  source 1..120: mol_type = other DNA
aagcagctctttttagtttaggcatccaaatatatagtaagatgtttcaaagaacatcaatctattcacaaaggtaaatacggcctaatacggagagacaaatacaaatctgaaatgact

SEQ ID NO: 489 - DNA, 120 bp, synthetic construct
  source 1..120: mol_type = other DNA
gatgtttcaaagaacatcaatctattcacaaaggtaaatacggcctaatacggagagacaaatacaaatctgaaatgactcaagcaattaaaagatggaggaattcatgtcacttgcact

SEQ ID NO: 490 - DNA, 120 bp, synthetic construct
  source 1..120: mol_type = other DNA
caagcaattaaaagatggaggaattcatgtcacttgcactgggaaaacaaaacaaagatcctcctcaccctattacccacattactatttttaggttttttaggggttaaaaaagatcaa

SEQ ID NO: 491 - DNA, 120 bp, synthetic construct
  source 1..120: mol_type = other DNA
gggaaaacaaaacaaagatcctcctcaccctattacccacattactatttttaggttttttaggggttaaaaaagatcaaaacactaatgaactttaagtcctgtgaagggtaaaacctc

SEQ ID NO: 492 - DNA, 120 bp, synthetic construct
  source 1..120: mol_type = other DNA
aacactaatgaactttaagtcctgtgaagggtaaaacctcagatagtaacaaaaagcttccaacccctcctcaaacaaaaaaccccaagtctttaactttgatccagttttcagatgctg

SEQ ID NO: 493 - DNA, 120 bp, synthetic construct
  source 1..120: mol_type = other DNA
agatagtaacaaaaagcttccaacccctcctcaaacaaaaaaccccaagtctttaactttgatccagttttcagatgctgatatccataaatggatacagttatgaattgctaattctgg

SEQ ID NO: 494 - DNA, 120 bp, synthetic construct
  source 1..120: mol_type = other DNA
atatccataaatggatacagttatgaattgctaattctggtctcttcactagcaaaaagcaaagcagctcagcagtacaatttcccaggaaagcaagcaaggtttctttccagcctgagc

SEQ ID NO: 495 - DNA, 120 bp, synthetic construct
  source 1..120: mol_type = other DNA
tctcttcactagcaaaaagcaaagcagctcagcagtacaatttcccaggaaagcaagcaaggtttctttccagcctgagcagccatcactaagtgcagttccctgcagccaacagcatta

SEQ ID NO: 496 - DNA, 120 bp, synthetic construct
  source 1..120: mol_type = other DNA
agccatcactaagtgcagttccctgcagccaacagcattaatggacgctgcactgctgtccttccctggagacagcagccagcactactcaagcttctcacgtagcaaccagagctccag

SEQ ID NO: 497 - DNA, 120 bp, synthetic construct
  source 1..120: mol_type = other DNA
atggacgctgcactgctgtccttccctggagacagcagccagcactactcaagcttctcacgtagcaaccagagctccagagccagcagctgctgccgccttgtatactcactcctgtga

SEQ ID NO: 498 - DNA, 120 bp, synthetic construct
  source 1..120: mol_type = other DNA
agccagcagctgctgccgccttgtatactcactcctgtgatccaacacaggagcaaccttttctttaccccacccccacttcttaacacacttttttttgggggggggggggaacaagtg

SEQ ID NO: 499 - DNA, 120 bp, synthetic construct
  source 1..120: mol_type = other DNA
tccaacacaggagcaaccttttctttaccccacccccacttcttaacacacttttttttgggggggggggggaacaagtgctccatgctggaaggattggaactatgcttttagaaagga

SEQ ID NO: 500 - DNA, 120 bp, synthetic construct
  source 1..120: mol_type = other DNA
ctccatgctggaaggattggaactatgcttttagaaaggaacaatcctaaggtcacttttaaattgaggtctttgatttgaaaatcaacaaataccaaattccaaatattcgttttaatt

SEQ ID NO: 501 - DNA, 120 bp, synthetic construct
  source 1..120: mol_type = other DNA
acaatcctaaggtcacttttaaattgaggtctttgatttgaaaatcaacaaataccaaattccaaatattcgttttaattaaaccagcaatgtggatataagcattaagttttagtttta

SEQ ID NO: 502 - DNA, 120 bp, synthetic construct
  source 1..120: mol_type = other DNA
aaaccagcaatgtggatataagcattaagttttagttttaaaaaggtcaattttccaaacattcagcaatcatatttaaatttacagctaggaacaagagccttgggtcatgtcctacca

SEQ ID NO: 503 - DNA, 120 bp, synthetic construct
  source 1..120: mol_type = other DNA
aaaaggtcaattttccaaacattcagcaatcatatttaaatttacagctaggaacaagagccttgggtcatgtcctaccaaagaacataactcaatattctacacatgacaatctgaata

SEQ ID NO: 504 - DNA, 120 bp, synthetic construct
  source 1..120: mol_type = other DNA
aagaacataactcaatattctacacatgacaatctgaataaccttaaagcctctaatcccataacaggccacaaattttggacagagaactaatgatcctcctgagaaaactggaagaaa

SEQ ID NO: 505 - DNA, 120 bp, synthetic construct
  source 1..120: mol_type = other DNA
accttaaagcctctaatcccataacaggccacaaattttggacagagaactaatgatcctcctgagaaaactggaagaaatccagggaaaagaaattcctgtgtcctccaaactcagaaa

SEQ ID NO: 506 - DNA, 120 bp, synthetic construct
  source 1..120: mol_type = other DNA
tccagggaaaagaaattcctgtgtcctccaaactcagaaatctctaattatgtcagtattctctgctttagtcctaggtcagattgcacacatctaaaataacctcttaaagttttcctc

SEQ ID NO: 507 - DNA, 120 bp, synthetic construct
  source 1..120: mol_type = other DNA
tctctaattatgtcagtattctctgctttagtcctaggtcagattgcacacatctaaaataacctcttaaagttttcctcctagcgacctaaaccattattaatatcaaattaaccatca

SEQ ID NO: 508 - DNA, 120 bp, synthetic construct
  source 1..120: mol_type = other DNA
ctagcgacctaaaccattattaatatcaaattaaccatcaaaacactttcctctcaatatgctgcacacaaacctcctcctggaacctcctccatctggatcctccccaatcaaaagtat

SEQ ID NO: 509 - DNA, 120 bp, synthetic construct
  source 1..120: mol_type = other DNA
aaacactttcctctcaatatgctgcacacaaacctcctcctggaacctcctccatctggatcctccccaatcaaaagtataggtatttaacatataagcaaggaagtaatgtaaacatga

SEQ ID NO: 510 - DNA, 120 bp, synthetic construct
  source 1..120: mol_type = other DNA
aggtatttaacatataagcaaggaagtaatgtaaacatgaccttggtcacaaatatgtcatctaaaaacaatttagtcaaggtatggaggaaattcgagaacctgaatctttttaagtat

SEQ ID NO: 511 - DNA, 120 bp, synthetic construct
  source 1..120: mol_type = other DNA
ccttggtcacaaatatgtcatctaaaaacaatttagtcaaggtatggaggaaattcgagaacctgaatctttttaagtattttgagcacaggaacaattggcaaaaggaatccaggtata

SEQ ID NO: 512 - DNA, 120 bp, synthetic construct
  source 1..120: mol_type = other DNA
tttgagcacaggaacaattggcaaaaggaatccaggtatagacaaaacccagagcccagagctctgggcgaaaaatgagttgctggtgaagacgttacacaagtaacatgagaaagcaga

SEQ ID NO: 513 - DNA, 120 bp, synthetic construct
  source 1..120: mol_type = other DNA
gacaaaacccagagcccagagctctgggcgaaaaatgagttgctggtgaagacgttacacaagtaacatgagaaagcagaaaatgcaggtcatccacgcacccctgacccaggccagcag

SEQ ID NO: 514 - DNA, 120 bp, synthetic construct
  source 1..120: mol_type = other DNA
aaatgcaggtcatccacgcacccctgacccaggccagcagggcgggctgcagcatcagtacacaggagaaagatccttattcctaagaatgagaaaggcaaaggcgcccgatagaataaa

SEQ ID NO: 515 - DNA, 120 bp, synthetic construct
  source 1..120: mol_type = other DNA
ggcgggctgcagcatcagtacacaggagaaagatccttattcctaagaatgagaaaggcaaaggcgcccgatagaataaattagcatagaaggggctttcccaggagttaaaactttcct

SEQ ID NO: 516 - DNA, 120 bp, synthetic construct
  source 1..120: mol_type = other DNA
ttagcatagaaggggctttcccaggagttaaaactttccttctgagcgattacctactaaaaccagggcttttgcccactaccatttacctaggatcttggcttgcacggattcataggg

SEQ ID NO: 517 - DNA, 120 bp, synthetic construct
  source 1..120: mol_type = other DNA
tctgagcgattacctactaaaaccagggcttttgcccactaccatttacctaggatcttggcttgcacggattcataggggcatatccctccccctcttctttagagtcgttcttaaaag

SEQ ID NO: 518 - DNA, 120 bp, synthetic construct
  source 1..120: mol_type = other DNA
gcatatccctccccctcttctttagagtcgttcttaaaagatcgctctccacgccctaggcagggaaaacgacaaaatctggctcaattccaggctagaaccctacaaattcaacaggga

SEQ ID NO: 519 - DNA, 120 bp, synthetic construct
  source 1..120: mol_type = other DNA
atcgctctccacgccctaggcagggaaaacgacaaaatctggctcaattccaggctagaaccctacaaattcaacagggatatcgcaaggatactggggcatacgccacagggagtccaa

SEQ ID NO: 520 - DNA, 120 bp, synthetic construct
  source 1..120: mol_type = other DNA
tatcgcaaggatactggggcatacgccacagggagtccaagaatgtgaggtgggggtggcgaaggtaatgtctttggtgtgggaaaagcagcagccatctgagataggaactggaaaacc

SEQ ID NO: 521 - DNA, 120 bp, synthetic construct
  source 1..120: mol_type = other DNA
gaatgtgaggtgggggtggcgaaggtaatgtctttggtgtgggaaaagcagcagccatctgagataggaactggaaaaccagaggagaggcgttcaggaagattatggaggggaggactg

SEQ ID NO: 522 - DNA, 120 bp, synthetic construct
  source 1..120: mol_type = other DNA
agaggagaggcgttcaggaagattatggaggggaggactgggcccccacgagcgaccagagttgtcacaaggccgcaagaacaggggaggtggggggctcagggacagaaaaaaaagtat

SEQ ID NO: 523 - DNA, 120 bp, synthetic construct
  source 1..120: mol_type = other DNA
ggcccccacgagcgaccagagttgtcacaaggccgcaagaacaggggaggtggggggctcagggacagaaaaaaaagtatgtgtattttgagagcagggttgggaggcctctcctgaaaa

SEQ ID NO: 524 - DNA, 120 bp, synthetic construct
  source 1..120: mol_type = other DNA
gtgtattttgagagcagggttgggaggcctctcctgaaaagggtataaacgtggagtaggcaatacccaggcaaaaaggggagaccagagtagggggaggggaagagtcctgacccaggg

SEQ ID NO: 525 - DNA, 120 bp, synthetic construct
  source 1..120: mol_type = other DNA
gggtataaacgtggagtaggcaatacccaggcaaaaaggggagaccagagtagggggaggggaagagtcctgacccagggaagacattaaaaaggtagtggggtcgactagatgaaggag

SEQ ID NO: 526 - DNA, 120 bp, synthetic construct
  source 1..120: mol_type = other DNA
aagacattaaaaaggtagtggggtcgactagatgaaggagagcctttctctctgggcaagagcggtgcaatggtgtgtaaaggtagctgagaagacgaaaagggcaagcatcttcctgct

SEQ ID NO: 527 - DNA, 120 bp, synthetic construct
  source 1..120: mol_type = other DNA
agcctttctctctgggcaagagcggtgcaatggtgtgtaaaggtagctgagaagacgaaaagggcaagcatcttcctgctaccaggctggggaggcccaggcccacgaccccgaggagag

SEQ ID NO: 528 - DNA, 120 bp, synthetic construct
  source 1..120: mol_type = other DNA
accaggctggggaggcccaggcccacgaccccgaggagagggaacgcagggagactgaggtgacccttctttcccccggggcccggtcgtgtggttcggtgtctcttttctgttggaccc

SEQ ID NO: 529 - DNA, 120 bp, synthetic construct
  source 1..120: mol_type = other DNA
ggaacgcagggagactgaggtgacccttctttcccccggggcccggtcgtgtggttcggtgtctcttttctgttggacccttaccttgacccaggcgctgccggggcctgggcccgggct

SEQ ID NO: 530 - DNA, 120 bp, synthetic construct
  source 1..120: mol_type = other DNA
ttaccttgacccaggcgctgccggggcctgggcccgggctgcggcgcacggcactcccgggaggcagcgagactcgagttaggcccaacgcggcgccacggcgtttcctggccgggaatg

SEQ ID NO: 531 - DNA, 120 bp, synthetic construct
  source 1..120: mol_type = other DNA
gcggcgcacggcactcccgggaggcagcgagactcgagttaggcccaacgcggcgccacggcgtttcctggccgggaatggcccgtacccgtgaggtgggggtggggggcagaaaaggcg

SEQ ID NO: 532 - DNA, 120 bp, synthetic construct
  source 1..120: mol_type = other DNA
gcccgtacccgtgaggtgggggtggggggcagaaaaggcggagcgagcccgaggcggggagggggagggccaggggcggagggggccggcactactgtgttggcggactggcgggactag

SEQ ID NO: 533 - DNA, 120 bp, synthetic construct
  source 1..120: mol_type = other DNA
gagcgagcccgaggcggggagggggagggccaggggcggagggggccggcactactgtgttggcggactggcgggactagggctgcgtgagtctctgagcgcaggcgggcggcggccgcc

SEQ ID NO: 534 - DNA, 120 bp, synthetic construct
  source 1..120: mol_type = other DNA
ggctgcgtgagtctctgagcgcaggcgggcggcggccgcccctcccccggcggcggcagcggcggcagcggcggcagctcactcagcccgctgcccgagcggaaacgccactgaccgcac

SEQ ID NO: 535 - DNA, 120 bp, synthetic construct
  source 1..120: mol_type = other DNA
cctcccccggcggcggcagcggcggcagcggcggcagctcactcagcccgctgcccgagcggaaacgccactgaccgcacggggattcccagtgccggcgccaggggcacgcgggacacg

SEQ ID NO: 536 - DNA, 120 bp, synthetic construct
  source 1..120: mol_type = other DNA
ggggattcccagtgccggcgccaggggcacgcgggacacgccccctcccgccgcgccattggcctctccgcccaccgccccacacttattggccggtgcgccgccaatcagcggaggctg

SEQ ID NO: 537 - DNA, 120 bp, synthetic construct
  source 1..120: mol_type = other DNA
ccccctcccgccgcgccattggcctctccgcccaccgccccacacttattggccggtgcgccgccaatcagcggaggctgccggggccgcctaaagaagaggctgtgctttggggctccg

SEQ ID NO: 538 - DNA, 120 bp, synthetic construct
  source 1..120: mol_type = other DNA
ccggggccgcctaaagaagaggctgtgctttggggctccggctcctcagagagcctcggctaggtaggggatcgggactctggcgggagggcggcttggtgcgtttgcggggatgggcgg

SEQ ID NO: 539 - DNA, 120 bp, synthetic construct
  source 1..120: mol_type = other DNA
gctcctcagagagcctcggctaggtaggggatcgggactctggcgggagggcggcttggtgcgtttgcggggatgggcggccgcggcaggccctccgagcgtggtggagccgttctgtga

SEQ ID NO: 540 - DNA, 120 bp, synthetic construct
  source 1..120: mol_type = other DNA
ccgcggcaggccctccgagcgtggtggagccgttctgtgagacagccgggtacgagtcgtgacgctggaaggggcaagcgggtggtgggcaggaatgcggtccgccctgcagcaaccgga

SEQ ID NO: 541 - DNA, 120 bp, synthetic construct
  source 1..120: mol_type = other DNA
gacagccgggtacgagtcgtgacgctggaaggggcaagcgggtggtgggcaggaatgcggtccgccctgcagcaaccggagggggagggagaagggagcggaaaagtctccaccggacgc

SEQ ID NO: 542 - DNA, 120 bp, synthetic construct
  source 1..120: mol_type = other DNA
gggggagggagaagggagcggaaaagtctccaccggacgcggccatggctcgggggggggggggcagcggaggagcgcttccggccgacgtctcgtcgctgattggcttcttttcctccc

SEQ ID NO: 543 - DNA, 120 bp, synthetic construct
  source 1..120: mol_type = other DNA
ggccatggctcgggggggggggggcagcggaggagcgcttccggccgacgtctcgtcgctgattggcttcttttcctcccgccgtgtgtgaaaacacaaatggcgtgttttggttggcgt

SEQ ID NO: 544 - DNA, 120 bp, synthetic construct
  source 1..120: mol_type = other DNA
gccgtgtgtgaaaacacaaatggcgtgttttggttggcgtaaggcgcctgtcagttaacggcagccggagtgcgcagccgccggcagcctcgctctgcccactgggtggggcgggaggta

SEQ ID NO: 545 - DNA, 120 bp, synthetic construct
  source 1..120: mol_type = other DNA
aaggcgcctgtcagttaacggcagccggagtgcgcagccgccggcagcctcgctctgcccactgggtggggcgggaggtaggtggggtgaggcgagctggacgtgcgggcgcggtcggcc

SEQ ID NO: 546 - DNA, 120 bp, synthetic construct
  source 1..120: mol_type = other DNA
ggtggggtgaggcgagctggacgtgcgggcgcggtcggcctctggcggggcgggggaggggagggagggtcagcgaaagtagctcgcgcgcgagcggccgcccaccctccccttcctctg

SEQ ID NO: 547 - DNA, 120 bp, synthetic construct
  source 1..120: mol_type = other DNA
tctggcggggcgggggaggggagggagggtcagcgaaagtagctcgcgcgcgagcggccgcccaccctccccttcctctgggggagtcgttttacccgccgccggccgggcctcgtcgtc

SEQ ID NO: 548 - DNA, 120 bp, synthetic construct
  source 1..120: mol_type = other DNA
ggggagtcgttttacccgccgccggccgggcctcgtcgtctgattggctctcggggcccagaaaactggcccttgccattggctcgtgttcgtgcaagttgagtccatccgccggccagc

SEQ ID NO: 549 - DNA, 120 bp, synthetic construct
  source 1..120: mol_type = other DNA
tgattggctctcggggcccagaaaactggcccttgccattggctcgtgttcgtgcaagttgagtccatccgccggccagcgggggcggcgaggaggcgctcccaggttccggccctcccc

SEQ ID NO: 550 - DNA, 120 bp, synthetic construct
  source 1..120: mol_type = other DNA
gggggcggcgaggaggcgctcccaggttccggccctcccctcggccccgcgccgcagagtctggccgcgcgcccctgcgcaacgtggcaggaagcgcgcgctgggggcggggacgggcag

SEQ ID NO: 551 - DNA, 120 bp, synthetic construct
  source 1..120: mol_type = other DNA
tcggccccgcgccgcagagtctggccgcgcgcccctgcgcaacgtggcaggaagcgcgcgctgggggcggggacgggcagtagggctgagcggctgcggggcgggtgcaagcacgtttcc

SEQ ID NO: 552 - DNA, 120 bp, synthetic construct
  source 1..120: mol_type = other DNA
tagggctgagcggctgcggggcgggtgcaagcacgtttccgacttgagttgcctcaagaggggcgtgctgagccagacctccatcgcgcactccggggagtggagggaaggagcgagggc

SEQ ID NO: 553 - DNA, 120 bp, synthetic construct
  source 1..120: mol_type = other DNA
gacttgagttgcctcaagaggggcgtgctgagccagacctccatcgcgcactccggggagtggagggaaggagcgagggctcagttgggctgttttggaggcaggaagcacttgctctcc

SEQ ID NO: 554 - DNA, 120 bp, synthetic construct
  source 1..120: mol_type = other DNA
tcagttgggctgttttggaggcaggaagcacttgctctcccaaagtcgctctgagttgttatcagtaagggagctgcagtggagtaggcggggagaaggccgcacccttctccggagggg

SEQ ID NO: 555 - DNA, 120 bp, synthetic construct
  source 1..120: mol_type = other DNA
caaagtcgctctgagttgttatcagtaagggagctgcagtggagtaggcggggagaaggccgcacccttctccggaggggggaggggagtgttgcaatacctttctgggagttctctgct

SEQ ID NO: 556 - DNA, 120 bp, synthetic construct
  source 1..120: mol_type = other DNA
ggaggggagtgttgcaatacctttctgggagttctctgctgcctcctggcttctgaggaccgccctgggcctgggagaatcccttccccctcttccctcgtgatctgcaactccagtctt

SEQ ID NO: 557 - DNA, 120 bp, synthetic construct
  source 1..120: mol_type = other DNA
gcctcctggcttctgaggaccgccctgggcctgggagaatcccttccccctcttccctcgtgatctgcaactccagtctttctagttaattaaccgtttaaacaattctgcaggaatcta

SEQ ID NO: 558 - DNA, 120 bp, synthetic construct
  source 1..120: mol_type = other DNA
gggggcgcgcgccaggcggggcggggcggggcgaggggcggggcggggcgaggcggagaggtgcggcggcagccaatcagagcggcgcgctccgaaagtttccttttatggcgaggcggc

SEQ ID NO: 559 - DNA, 120 bp, synthetic construct
  source 1..120: mol_type = other DNA
ggcggcggcggccctataaaaagcgaagcgcgcggcgggcggggagtcgctgcgacgctgccttcgccccgtgccccgctccgccgccgcctcgcgccgcccgccccggctctgactgac

SEQ ID NO: 560 - DNA, 120 bp, synthetic construct
  source 1..120: mol_type = other DNA
cgagttagactatgtaagcagaattttaatcatttttaaagagcccagtacttcatatccatttctcccgctccttctgcagccttatcaaaaggtattttagaacactcattttagccc

SEQ ID NO: 561 - DNA, 120 bp, synthetic construct
  source 1..120: mol_type = other DNA
gagcccagtacttcatatccatttctcccgctccttctgcagccttatcaaaaggtattttagaacactcattttagccccattttcatttattatactggcttatccaacccctagaca

SEQ ID NO: 562 - DNA, 120 bp, synthetic construct
  source 1..120: mol_type = other DNA
cattttcatttattatactggcttatccaacccctagacagagcattggcattttccctttcctgatcttagaagtctgatgactcatgaaaccagacagattagttacatacaccacaa

SEQ ID NO: 563 - DNA, 120 bp, synthetic construct
  source 1..120: mol_type = other DNA
gagcattggcattttccctttcctgatcttagaagtctgatgactcatgaaaccagacagattagttacatacaccacaaatcgaggctgtagctggggcctcaacactgcagttctttt

SEQ ID NO: 564 - DNA, 120 bp, synthetic construct
  source 1..120: mol_type = other DNA
atcgaggctgtagctggggcctcaacactgcagttcttttataactccttagtacactttttgttgatcctttgccttgatccttaattttcagtgtctatcacctctcccgtcaggtgg

SEQ ID NO: 565 - DNA, 120 bp, synthetic construct
  source 1..120: mol_type = other DNA
ataactccttagtacactttttgttgatcctttgccttgatccttaattttcagtgtctatcacctctcccgtcaggtggtgttccacatttgggcctattctcagtccagggagtttta

SEQ ID NO: 566 - DNA, 120 bp, synthetic construct
  source 1..120: mol_type = other DNA
tgttccacatttgggcctattctcagtccagggagttttacaacaatagatgtattgagaatccaacctaaagcttaactttccactcccatgaatgcctctctcctttttctccattta

SEQ ID NO: 567 - DNA, 120 bp, synthetic construct
  source 1..120: mol_type = other DNA
caacaatagatgtattgagaatccaacctaaagcttaactttccactcccatgaatgcctctctcctttttctccatttataaactgagctattaaccattaatggtttccaggtggatg

SEQ ID NO: 568 - DNA, 120 bp, synthetic construct
  source 1..120: mol_type = other DNA
taaactgagctattaaccattaatggtttccaggtggatgtctcctcccccaatattacctgatgtatcttacatattgccaggctgatattttaagacattaaaaggtatatttcatta

SEQ ID NO: 569 - DNA, 120 bp, synthetic construct
  source 1..120: mol_type = other DNA
tctcctcccccaatattacctgatgtatcttacatattgccaggctgatattttaagacattaaaaggtatatttcattattgagccacatggtattgattactgcttactaaaattttg

SEQ ID NO: 570 - DNA, 120 bp, synthetic construct
  source 1..120: mol_type = other DNA
ttgagccacatggtattgattactgcttactaaaattttgtcattgtacacatctgtaaaaggtggttccttttggaatgcaaagttcaggtgtttgttgtctttcctgacctaaggtct

SEQ ID NO: 571 - DNA, 120 bp, synthetic construct
  source 1..120: mol_type = other DNA
tcattgtacacatctgtaaaaggtggttccttttggaatgcaaagttcaggtgtttgttgtctttcctgacctaaggtcttgtgagcttgtattttttctatttaagcagtgctttctct

SEQ ID NO: 572 - DNA, 120 bp, synthetic construct
  source 1..120: mol_type = other DNA
tgtgagcttgtattttttctatttaagcagtgctttctcttggactggcttgactcatggcattctacacgttattgctggtctaaatgtgattttgccaagcttcttcaggacctataa

SEQ ID NO: 573 - DNA, 120 bp, synthetic construct
  source 1..120: mol_type = other DNA
tggactggcttgactcatggcattctacacgttattgctggtctaaatgtgattttgccaagcttcttcaggacctataattttgcttgacttgtagccaaacacaagtaaaatgattaa

SEQ ID NO: 574 - DNA, 120 bp, synthetic construct
  source 1..120: mol_type = other DNA
ttttgcttgacttgtagccaaacacaagtaaaatgattaagcaacaaatgtatttgtgaagcttggtttttaggttgttgtgttgtgtgtgcttgtgctctataataatactatccaggg

SEQ ID NO: 575 - DNA, 120 bp, synthetic construct
  source 1..120: mol_type = other DNA
gcaacaaatgtatttgtgaagcttggtttttaggttgttgtgttgtgtgtgcttgtgctctataataatactatccaggggctggagaggtggctcggagttcaagagcacagactgctc

SEQ ID NO: 576 - DNA, 120 bp, synthetic construct
  source 1..120: mol_type = other DNA
taaatcctccttcttcttcttttttttttttttaaagagaatactgtctccagtagaatttactgaagtaatgaaatactttgtgtttgttccaatatggtagccaataatcaaattact

SEQ ID NO: 577 - DNA, 120 bp, synthetic construct
  source 1..120: mol_type = other DNA
ttgtgtttgttccaatatggtagccaataatcaaattactctttaagcactggaaatgttaccaaggaactaatttttatttgaagtgtaactgtggacagaggagccataactgcagac

SEQ ID NO: 578 - DNA, 120 bp, synthetic construct
  source 1..120: mol_type = other DNA
ctttaagcactggaaatgttaccaaggaactaatttttatttgaagtgtaactgtggacagaggagccataactgcagacttgtgggatacagaagaccaatgcagactttaatgtcttt

SEQ ID NO: 579 - DNA, 120 bp, synthetic construct
  source 1..120: mol_type = other DNA
ttgtgggatacagaagaccaatgcagactttaatgtcttttctcttacactaagcaataaagaaataaaaattgaacttctagtatcctatttgtttaaactgctagctttacttaactt

SEQ ID NO: 580 - DNA, 120 bp, synthetic construct
  source 1..120: mol_type = other DNA
tctcttacactaagcaataaagaaataaaaattgaacttctagtatcctatttgtttaaactgctagctttacttaacttttgtgcttcatctatacaaagctgaaagctaagtctgcag

SEQ ID NO: 581 - DNA, 120 bp, synthetic construct
  source 1..120: mol_type = other DNA
ttgtgcttcatctatacaaagctgaaagctaagtctgcagccattactaaacatgaaagcaagtaatgataattttggatttcaaaaatgtagggccagagtttagccagccagtggtgg

SEQ ID NO: 582 - DNA, 120 bp, synthetic construct
  source 1..120: mol_type = other DNA
aaaccctgttggggaggggggctctgagatttcataaaattataattgaagcattccctaatgagccactatggatgtggctaaatccgtctacctttctgatgagatttgggtattatt

SEQ ID NO: 583 - DNA, 120 bp, synthetic construct
  source 1..120: mol_type = other DNA
tataattgaagcattccctaatgagccactatggatgtggctaaatccgtctacctttctgatgagatttgggtattattttttctgtctctgctgttggttgggtcttttgacactgtg

SEQ ID NO: 584 - DNA, 120 bp, synthetic construct
  source 1..120: mol_type = other DNA
ttttctgtctctgctgttggttgggtcttttgacactgtgggctttctttaaagcctccttcctgccatgtggtctcttgtttgctactaacttcccatggcttaaatggcatggctttt

SEQ ID NO: 585 - DNA, 120 bp, synthetic construct
  source 1..120: mol_type = other DNA
ggctttctttaaagcctccttcctgccatgtggtctcttgtttgctactaacttcccatggcttaaatggcatggctttttgccttctaagggcagctgctgagatttgcagcctgattt

SEQ ID NO: 586 - DNA, 120 bp, synthetic construct
  source 1..120: mol_type = other DNA
tgccttctaagggcagctgctgagatttgcagcctgatttccagggtggggttgggaaatctttcaaacactaaaattgtcctttaattttttttttaaaaaatgggttatataataaac

SEQ ID NO: 587 - DNA, 120 bp, synthetic construct
  source 1..120: mol_type = other DNA
ccagggtggggttgggaaatctttcaaacactaaaattgtcctttaattttttttttaaaaaatgggttatataataaacctcataaaatagttatgaggagtgaggtggactaatatta

SEQ ID NO: 588 - DNA, 120 bp, synthetic construct
  source 1..120: mol_type = other DNA
ctcataaaatagttatgaggagtgaggtggactaatattaaatgagtccctcccctataaaagagctattaaggctttttgtcttatacttaactttttttttaaatgtggtatctttag

SEQ ID NO: 589 - DNA, 120 bp, synthetic construct
  source 1..120: mol_type = other DNA
aatgagtccctcccctataaaagagctattaaggctttttgtcttatacttaactttttttttaaatgtggtatctttagaaccaagggtcttagagttttagtatacagaaactgttgc

SEQ ID NO: 590 - DNA, 120 bp, synthetic construct
  source 1..120: mol_type = other DNA
aaccaagggtcttagagttttagtatacagaaactgttgcatcgcttaatcagattttctagtttcaaatccagagaatccaaattcttcacagccaaagtcaaattaagaatttctgac

SEQ ID NO: 591 - DNA, 120 bp, synthetic construct
  source 1..120: mol_type = other DNA
atcgcttaatcagattttctagtttcaaatccagagaatccaaattcttcacagccaaagtcaaattaagaatttctgacttttaatgttaatttgcttactgtgaatataaaaatgata

SEQ ID NO: 592 - DNA, 120 bp, synthetic construct
  source 1..120: mol_type = other DNA
ttttaatgttaatttgcttactgtgaatataaaaatgatagcttttcctgaggcagggtctcactatgtatctctgcctgatctgcaacaagatatgtagactaaagttctgcctgcttt

SEQ ID NO: 593 - DNA, 120 bp, synthetic construct
  source 1..120: mol_type = other DNA
gcttttcctgaggcagggtctcactatgtatctctgcctgatctgcaacaagatatgtagactaaagttctgcctgcttttgtctcctgaatactaaggttaaaatgtagtaatactttt

SEQ ID NO: 594 - DNA, 120 bp, synthetic construct
  source 1..120: mol_type = other DNA
tgtctcctgaatactaaggttaaaatgtagtaatacttttggaacttgcaggtcagattcttttataggggacacactaagggagcttgggtgatagttggtaaaatgtgtttcaagtga

SEQ ID NO: 595 - DNA, 120 bp, synthetic construct
  source 1..120: mol_type = other DNA
ggaacttgcaggtcagattcttttataggggacacactaagggagcttgggtgatagttggtaaaatgtgtttcaagtgatgaaaacttgaattattatcaccgcaacctactttttaaa

SEQ ID NO: 596 - DNA, 120 bp, synthetic construct
  source 1..120: mol_type = other DNA
tgaaaacttgaattattatcaccgcaacctactttttaaaaaaaaaagccaggcctgttagagcatgcttaagggatccctaggacttgctgagcacacaagagtagttacttggcaggc

SEQ ID NO: 597 - DNA, 120 bp, synthetic construct
  source 1..120: mol_type = other DNA
aaaaaaagccaggcctgttagagcatgcttaagggatccctaggacttgctgagcacacaagagtagttacttggcaggctcctggtgagagcatatttcaaaaaacaaggcagacaacc

SEQ ID NO: 598 - DNA, 120 bp, synthetic construct
  source 1..120: mol_type = other DNA
tcctggtgagagcatatttcaaaaaacaaggcagacaaccaagaaactacagttaaggttacctgtctttaaaccatctgcatatacacagggatattaaaatattccaaataatatttc

SEQ ID NO: 599 - DNA, 120 bp, synthetic construct
  source 1..120: mol_type = other DNA
aagaaactacagttaaggttacctgtctttaaaccatctgcatatacacagggatattaaaatattccaaataatatttcattcaagttttcccccatcaaattgggacatggatttctc

SEQ ID NO: 600 - DNA, 120 bp, synthetic construct
  source 1..120: mol_type = other DNA
attcaagttttcccccatcaaattgggacatggatttctccggtgaataggcagagttggaaactaaacaaatgttggttttgtgatttgtgaaattgttttcaagtgatagttaaagcc

SEQ ID NO: 601 - DNA, 120 bp, synthetic construct
  source 1..120: mol_type = other DNA
cggtgaataggcagagttggaaactaaacaaatgttggttttgtgatttgtgaaattgttttcaagtgatagttaaagcccatgagatacagaacaaagctgctatttcgaggtctcttg

SEQ ID NO: 602 - DNA, 120 bp, synthetic construct
  source 1..120: mol_type = other DNA
catgagatacagaacaaagctgctatttcgaggtctcttggtttatactcagaagcacttctttgggtttccctgcactatcctgatcatgtgctaggcctaccttaggctgattgttgt

SEQ ID NO: 603 - DNA, 120 bp, synthetic construct
  source 1..120: mol_type = other DNA
gtttatactcagaagcacttctttgggtttccctgcactatcctgatcatgtgctaggcctaccttaggctgattgttgttcaaataaacttaagtttcctgtcaggtgatgtcatatga

SEQ ID NO: 604 - DNA, 120 bp, synthetic construct
  source 1..120: mol_type = other DNA
tcaaataaacttaagtttcctgtcaggtgatgtcatatgatttcatatatcaaggcaaaacatgttatatatgttaaacatttgtacttaatgtgaaagttaggtctttgtgggtttgat

SEQ ID NO: 605 - DNA, 120 bp, synthetic construct
  source 1..120: mol_type = other DNA
tttcatatatcaaggcaaaacatgttatatatgttaaacatttgtacttaatgtgaaagttaggtctttgtgggtttgatttttaattttcaaaacctgagctaaataagtcatttttac

SEQ ID NO: 606 - DNA, 120 bp, synthetic construct
  source 1..120: mol_type = other DNA
ttttaattttcaaaacctgagctaaataagtcatttttacatgtcttacatttggtggaattgtataattgtggtttgcaggcaagactctctgacctagtaaccctacctatagagcac

SEQ ID NO: 607 - DNA, 120 bp, synthetic construct
  source 1..120: mol_type = other DNA
atgtcttacatttggtggaattgtataattgtggtttgcaggcaagactctctgacctagtaaccctacctatagagcactttgctgggtcacaagtctaggagtcaagcatttcacctt

SEQ ID NO: 608 - DNA, 120 bp, synthetic construct
  source 1..120: mol_type = other DNA
tttgctgggtcacaagtctaggagtcaagcatttcaccttgaagttgagacgttttgttagtgtatactagtttatatgttggaggacatgtttatccagaagatattcaggactatttt

SEQ ID NO: 609 - DNA, 120 bp, synthetic construct
  source 1..120: mol_type = other DNA
gaagttgagacgttttgttagtgtatactagtttatatgttggaggacatgtttatccagaagatattcaggactatttttgactgggctaaggaattgattctgattagcactgttagt

SEQ ID NO: 610 - DNA, 120 bp, synthetic construct
  source 1..120: mol_type = other DNA
tgactgggctaaggaattgattctgattagcactgttagtgagcattgagtggcctttaggcttgaattggagtcacttgtatatctcaaataatgctggccttttttaaaaagcccttg

SEQ ID NO: 611 - DNA, 120 bp, synthetic construct
  source 1..120: mol_type = other DNA
gagcattgagtggcctttaggcttgaattggagtcacttgtatatctcaaataatgctggccttttttaaaaagcccttgttctttatcaccctgttttctacataatttttgttcaaag

SEQ ID NO: 612 - DNA, 120 bp, synthetic construct
  source 1..120: mol_type = other DNA
ttctttatcaccctgttttctacataatttttgttcaaagaaatacttgtttggatctccttttgacaacaatagcatgttttcaagccatattttttttcctttttttttttttttttg

SEQ ID NO: 613 - DNA, 120 bp, synthetic construct
  source 1..120: mol_type = other DNA
gcgtgcaccaccacgcctggctaagttggatattttgttatataactataaccaatactaactccactgggtggatttttaattcagtcagtagtcttaagtggtctttattggcccttc

SEQ ID NO: 614 - DNA, 120 bp, synthetic construct
  source 1..120: mol_type = other DNA
tataactataaccaatactaactccactgggtggatttttaattcagtcagtagtcttaagtggtctttattggcccttcattaaaatctactgttcactctaacagaggctgttggtac

SEQ ID NO: 615 - DNA, 120 bp, synthetic construct
  source 1..120: mol_type = other DNA
attaaaatctactgttcactctaacagaggctgttggtactagtggcacttaagcaacttcctacggatatactagcagattaagggtcagggatagaaactagtctagcgttttgtata

SEQ ID NO: 616 - DNA, 120 bp, synthetic construct
  source 1..120: mol_type = other DNA
tagtggcacttaagcaacttcctacggatatactagcagattaagggtcagggatagaaactagtctagcgttttgtatacctaccagctttatactaccttgttctgatagaaatattt

SEQ ID NO: 617 - DNA, 120 bp, synthetic construct
  source 1..120: mol_type = other DNA
tactagcagattaagggtcagggatagaaactagtctagcgttttgtatacctaccagctttatactaccttgttctgatagaaatatttcaggacatctagagtgtactataaggttga

SEQ ID NO: 618 - DNA, 120 bp, synthetic construct
  source 1..120: mol_type = other DNA
tctagttaattaaccgtttaaacaattctgcaggaatctagttattaatagtaatcaattacggggtcattagttcatagcccatatatggagttccgcgttacataacttacggtaaat

SEQ ID NO: 619 - DNA, 120 bp, synthetic construct
  source 1..120: mol_type = other DNA
gttattaatagtaatcaattacggggtcattagttcatagcccatatatggagttccgcgttacataacttacggtaaatggcccgcctggctgaccgcccaacgacccccgcccattga

SEQ ID NO: 620 - DNA, 120 bp, synthetic construct
  source 1..120: mol_type = other DNA
ggcccgcctggctgaccgcccaacgacccccgcccattgacgtcaataatgacgtatgttcccatagtaacgccaatagggactttccattgacgtcaatgggtggagtatttacggtaa

SEQ ID NO: 621 - DNA, 120 bp, synthetic construct
  source 1..120: mol_type = other DNA
cgtcaataatgacgtatgttcccatagtaacgccaatagggactttccattgacgtcaatgggtggagtatttacggtaaactgcccacttggcagtacatcaagtgtatcatatgccaa

SEQ ID NO: 622 - DNA, 120 bp, synthetic construct
  source 1..120: mol_type = other DNA
actgcccacttggcagtacatcaagtgtatcatatgccaagtacgccccctattgacgtcaatgacggtaaatggcccgcctggcattatgcccagtacatgaccttatgggactttcct

SEQ ID NO: 623 - DNA, 120 bp, synthetic construct
  source 1..120: mol_type = other DNA
gtacgccccctattgacgtcaatgacggtaaatggcccgcctggcattatgcccagtacatgaccttatgggactttcctacttggcagtacatctacgtattagtcatcgctattacca

SEQ ID NO: 624 - DNA, 120 bp, synthetic construct
  source 1..120: mol_type = other DNA
acttggcagtacatctacgtattagtcatcgctattaccatggtcgaggtgagccccacgttctgcttcactctccccatctcccccccctccccacccccaattttgtatttatttatt

SEQ ID NO: 625 - DNA, 120 bp, synthetic construct
  source 1..120: mol_type = other DNA
tggtcgaggtgagccccacgttctgcttcactctccccatctcccccccctccccacccccaattttgtatttatttattttttaattattttgtgcagcgatgggggcggggggggggg

SEQ ID NO: 626 - DNA, 120 bp, synthetic construct
  source 1..120: mol_type = other DNA
agcggcgcgctccgaaagtttccttttatggcgaggcggcggcggcggcggccctataaaaagcgaagcgcgcggcgggcggggagtcgctgcgacgctgccttcgccccgtgccccgct

SEQ ID NO: 627 - DNA, 120 bp, synthetic construct
  source 1..120: mol_type = other DNA
ccgccgccgcctcgcgccgcccgccccggctctgactgaccgcgttactcccacaggtgagcgggcgggacggcccttctcctccgggctgtaattagcgcttggtttaatgacggcttg

SEQ ID NO: 628 - DNA, 120 bp, synthetic construct
  source 1..120: mol_type = other DNA
cgcgttactcccacaggtgagcgggcgggacggcccttctcctccgggctgtaattagcgcttggtttaatgacggcttgtttcttttctgtggctgcgtgaaagccttgaggggctccg

SEQ ID NO: 629 - DNA, 120 bp, synthetic construct
  source 1..120: mol_type = other DNA
tttcttttctgtggctgcgtgaaagccttgaggggctccgggagggccctttgtgcggggggagcggctcggggggtgcgtgcgtgtgtgtgtgcgtggggagcgccgcgtgcggctccg

SEQ ID NO: 630 - DNA, 120 bp, synthetic construct
  source 1..120: mol_type = other DNA
ggagggccctttgtgcggggggagcggctcggggggtgcgtgcgtgtgtgtgtgcgtggggagcgccgcgtgcggctccgcgctgcccggcggctgtgagcgctgcgggcgcggcgcggg

SEQ ID NO: 631 - DNA, 120 bp, synthetic construct
  source 1..120: mol_type = other DNA
cgctgcccggcggctgtgagcgctgcgggcgcggcgcggggctttgtgcgctccgcagtgtgcgcgaggggagcgcggccgggggcggtgccccgcggtgcggggggggctgcgagggga

SEQ ID NO: 632 - DNA, 120 bp, synthetic construct
  source 1..120: mol_type = other DNA
gctttgtgcgctccgcagtgtgcgcgaggggagcgcggccgggggcggtgccccgcggtgcggggggggctgcgaggggaacaaaggctgcgtgcggggtgtgtgcgtgggggggtgagc

SEQ ID NO: 633 - DNA, 120 bp, synthetic construct
  source 1..120: mol_type = other DNA
acaaaggctgcgtgcggggtgtgtgcgtgggggggtgagcagggggtgtgggcgcgtcggtcgggctgcaaccccccctgcacccccctccccgagttgctgagcacggcccggcttcgg

SEQ ID NO: 634 - DNA, 120 bp, synthetic construct
  source 1..120: mol_type = other DNA
agggggtgtgggcgcgtcggtcgggctgcaaccccccctgcacccccctccccgagttgctgagcacggcccggcttcgggtgcggggctccgtacggggcgtggcgcggggctcgccgt

SEQ ID NO: 635 - DNA, 120 bp, synthetic construct
  source 1..120: mol_type = other DNA
gtgcggggctccgtacggggcgtggcgcggggctcgccgtgccgggcggggggtggcggcaggtgggggtgccgggcggggcggggccgcctcgggccggggagggctcgggggaggggc

SEQ ID NO: 636 - DNA, 120 bp, synthetic construct
  source 1..120: mol_type = other DNA
gccgggcggggggtggcggcaggtgggggtgccgggcggggcggggccgcctcgggccggggagggctcgggggaggggcgcggcggcccccggagcgccggcggctgtcgaggcgcggc

SEQ ID NO: 637 - DNA, 120 bp, synthetic construct
  source 1..120: mol_type = other DNA
gcggcggcccccggagcgccggcggctgtcgaggcgcggcgagccgcagccattgccttttatggtaatcgtgcgagagggcgcagggacttcctttgtcccaaatctgtgcggagccga

SEQ ID NO: 638 - DNA, 120 bp, synthetic construct
  source 1..120: mol_type = other DNA
gagccgcagccattgccttttatggtaatcgtgcgagagggcgcagggacttcctttgtcccaaatctgtgcggagccgaaatctgggaggcgccgccgcaccccctctagcgggcgcgg

SEQ ID NO: 639 - DNA, 120 bp, synthetic construct
  source 1..120: mol_type = other DNA
aatctgggaggcgccgccgcaccccctctagcgggcgcggggcgaagcggtgcggcgccggcaggaaggaaatgggcggggagggccttcgtgcgtcgccgcgccgccgtccccttctcc

SEQ ID NO: 640 - DNA, 120 bp, synthetic construct
  source 1..120: mol_type = other DNA
ggcgaagcggtgcggcgccggcaggaaggaaatgggcggggagggccttcgtgcgtcgccgcgccgccgtccccttctccctctccagcctcggggctgtccgcggggggacggctgcct

SEQ ID NO: 641 - DNA, 120 bp, synthetic construct
  source 1..120: mol_type = other DNA
ctctccagcctcggggctgtccgcggggggacggctgccttcgggggggacggggcagggcggggttcggcttctggcgtgtgaccggcggctctagagcctctgctaaccatgttcatg

SEQ ID NO: 642 - DNA, 120 bp, synthetic construct
  source 1..120: mol_type = other DNA
tcgggggggacggggcagggcggggttcggcttctggcgtgtgaccggcggctctagagcctctgctaaccatgttcatgccttcttctttttcctacagctcctgggcaacgtgctggt

SEQ ID NO: 643 - DNA, 120 bp, synthetic construct
  source 1..120: mol_type = other DNA
ccttcttctttttcctacagctcctgggcaacgtgctggttattgtgctgtctcatcattttggcaaagaattgatttgataccgcgggccctaagaagttcctattctctagaaagtat

SEQ ID NO: 644 - DNA, 120 bp, synthetic construct
  source 1..120: mol_type = other DNA
tattgtgctgtctcatcattttggcaaagaattgatttgataccgcgggccctaagaagttcctattctctagaaagtataggaacttcgtcgacatttaaatcatttaaatataacttc

SEQ ID NO: 645 - DNA, 120 bp, synthetic construct
  source 1..120: mol_type = other DNA
aggaacttcgtcgacatttaaatcatttaaatataacttcgtataatgtatgctatacgaagttattcgcgatgaataaatgaaagcttgcagatctgcgactctagaggatctgcgact

SEQ ID NO: 646 - DNA, 120 bp, synthetic construct
  source 1..120: mol_type = other DNA
gtataatgtatgctatacgaagttattcgcgatgaataaatgaaagcttgcagatctgcgactctagaggatctgcgactctagaggatcataatcagccataccacattttgtagaggt

SEQ ID NO: 647 - DNA, 120 bp, synthetic construct
  source 1..120: mol_type = other DNA
ctagaggatcataatcagccataccacattttgtagaggttttacttgctttaaaaaacctcccacacctccccctgaacctgaaacataaaatgaatgcaattgttgttgttaacttgt

SEQ ID NO: 648 - DNA, 120 bp, synthetic construct
  source 1..120: mol_type = other DNA
tttacttgctttaaaaaacctcccacacctccccctgaacctgaaacataaaatgaatgcaattgttgttgttaacttgtttattgcagcttataatggttacaaataaagcaatagcat

SEQ ID NO: 649 - DNA, 120 bp, synthetic construct
  source 1..120: mol_type = other DNA
ttattgcagcttataatggttacaaataaagcaatagcatcacaaatttcacaaataaagcatttttttcactgcattctagttgtggtttgtccaaactcatcaatgtatcttatcatg

SEQ ID NO: 650 - DNA, 120 bp, synthetic construct
  source 1..120: mol_type = other DNA
cacaaatttcacaaataaagcatttttttcactgcattctagttgtggtttgtccaaactcatcaatgtatcttatcatgtctggatctgcgactctagaggatcataatcagccatacc

SEQ ID NO: 651 - DNA, 120 bp, synthetic construct
  source 1..120: mol_type = other DNA
tctggatctgcgactctagaggatcataatcagccataccacatttgtagaggttttacttgctttaaaaaacctcccacacctccccctgaacctgaaacataaaatgaatgcaattgt

SEQ ID NO: 652 - DNA, 120 bp, synthetic construct
  source 1..120: mol_type = other DNA
acatttgtagaggttttacttgctttaaaaaacctcccacacctccccctgaacctgaaacataaaatgaatgcaattgttgttgttaacttgtttattgcagcttataatggttacaaa

SEQ ID NO: 653 - DNA, 120 bp, synthetic construct
  source 1..120: mol_type = other DNA
tgttgttaacttgtttattgcagcttataatggttacaaataaagcaatagcatcacaaatttcacaaataaagcatttttttcactgcattctagttgtggtttgtccaaactcatcaa

SEQ ID NO: 654 - DNA, 120 bp, synthetic construct
  source 1..120: mol_type = other DNA
taaagcaatagcatcacaaatttcacaaataaagcatttttttcactgcattctagttgtggtttgtccaaactcatcaatgtatcttatcatgtctggatctgcgactctagaggatca

SEQ ID NO: 655 - DNA, 120 bp, synthetic construct
  source 1..120: mol_type = other DNA
tgtatcttatcatgtctggatctgcgactctagaggatcataatcagccataccacatttgtagaggttttacttgctttaaaaaacctcccacacctccccctgaacctgaaacataaa

SEQ ID NO: 656 - DNA, 120 bp, synthetic construct
  source 1..120: mol_type = other DNA
taatcagccataccacatttgtagaggttttacttgctttaaaaaacctcccacacctccccctgaacctgaaacataaaatgaatgcaattgttgttgttaacttgtttattgcagctt

SEQ ID NO: 657 - DNA, 120 bp, synthetic construct
  source 1..120: mol_type = other DNA
atgaatgcaattgttgttgttaacttgtttattgcagcttataatggttacaaataaagcaatagcatcacaaatttcacaaataaagcatttttttcactgcattctagttgtggtttg

SEQ ID NO: 658 - DNA, 120 bp, synthetic construct
  source 1..120: mol_type = other DNA
ataatggttacaaataaagcaatagcatcacaaatttcacaaataaagcatttttttcactgcattctagttgtggtttgtccaaactcatcaatgtatcttatcatgtctggatcccca

SEQ ID NO: 659 - DNA, 120 bp, synthetic construct
  source 1..120: mol_type = other DNA
tccaaactcatcaatgtatcttatcatgtctggatccccatcaagctgatccggaacccttaatataacttcgtataatgtatgctatacgaagttattaggtccctcgacctgcagcct

SEQ ID NO: 660 - DNA, 120 bp, synthetic construct
  source 1..120: mol_type = other DNA
tcaagctgatccggaacccttaatataacttcgtataatgtatgctatacgaagttattaggtccctcgacctgcagcctcgactgtgccttctagttgccagccatctgttgtttgccc

SEQ ID NO: 661 - DNA, 120 bp, synthetic construct
  source 1..120: mol_type = other DNA
cgactgtgccttctagttgccagccatctgttgtttgcccctcccccgtgccttccttgaccctggaaggtgccactcccactgtcctttcctaataaaatgaggaaattgcatcgcatt

SEQ ID NO: 662 - DNA, 120 bp, synthetic construct
  source 1..120: mol_type = other DNA
ctcccccgtgccttccttgaccctggaaggtgccactcccactgtcctttcctaataaaatgaggaaattgcatcgcattgtctgagtaggtgtcattctattctggggggtggggtggg

SEQ ID NO: 663 - DNA, 120 bp, synthetic construct
  source 1..120: mol_type = other DNA
gtctgagtaggtgtcattctattctggggggtggggtggggcaggacagcaagggggaggattgggaagacaatagcaggcatgctggggatgcggtgggctctataattcacagtgtcg

SEQ ID NO: 664 - DNA, 120 bp, synthetic construct
  source 1..120: mol_type = other DNA
gcaggacagcaagggggaggattgggaagacaatagcaggcatgctggggatgcggtgggctctataattcacagtgtcgcgagttagactatgtaagcagaattttaatcatttttaaa

SEQ ID NO: 665 - DNA, 202 bp, synthetic construct
  source 1..202: mol_type = other DNA
caacgtccagcctacctgggggagagtactctagagaagacatctaagtctctgttttctaagcttgtttttgtcctgccaaaacaaaattgtttgactggacccactggggttctgaagatcctgttaagtagaaaaatgacaagatggtttagtggttccaccttcctttctggttttcccagatgccagaaaggacccc

SEQ ID NO: 666 - DNA, 140 bp, synthetic construct
  source 1..140: mol_type = other DNA
ggcactcatgacttgtgcctgtccctaagcctgtgtccatcatgggcagctagatcctaggctgtcatttccaatgtgaagtctgtgaacaagactggctagtccagagagttccgctcttgcctgtcactggcatctga

SEQ ID NO: 667 - DNA, 277 bp, synthetic construct
  source 1..277: mol_type = other DNA
tcagtcctcttggcccacagacatcggctccggagccacgaacttctctctgttaaagcaagcaggagacgtggaagaaaaccccggtcccatgaacctttgtcctgaactggggattctactcttcctaatgcttggagaaagcaatggagactcggtgactcagacagaaggcccagtgacactgtctgaagggacttctctgactgtgaactgttcctatgaaaccaaacagtacccaaccctgttctggtatgtgcagtatcccggagaaggt

SEQ ID NO: 668 - DNA, 161 bp, synthetic construct
  source 1..161: mol_type = other DNA
ggccaacgagaagggaagcaacagaggttttgaagctacatacaataaagaagccacctccttccacttgcagaaagcctcagtgcaagagtcagactcggctgtgtactactgtgctctgggtgataattctgggacttaccagaggtttggaactggga

SEQ ID NO: 669 - DNA, 204 bp, synthetic construct
  source 1..204: mol_type = other DNA
tccagaacccagaacctgctgtgtaccagttaaaagatcctcggtctcaggacagcaccctctgcctgttcaccgactttgactcccaaatcaatgtgccgaaaaccatggaatctggaacgttcatcactgacaaaactgtgctggacatgaaagctatggattccaagagcaatggggccattgcctggagcaaccagacaa

SEQ ID NO: 670 - DNA, 149 bp, synthetic construct
  source 1..149: mol_type = other DNA
agttcaggtgagtggtgccccagaagtctcctcctggctcaaatctatggtttccaaaagctgctttgggtcatctcaccctcatcattaggcagcaaaatccacatcctgtgtcactaaggagtcctaacgggtcaccaaagcagaca

SEQ ID NO: 671 - DNA, 130 bp, synthetic construct
  source 1..130: mol_type = other DNA
cctcaaagaccttggccacataactgacatgtgttgtccatatgtggctctatgaccatgtgttcacagctgaacatctggcagtagggtttaaatgccccagctctgatgtcccatcctctggaaggac

SEQ ID NO: 672 - DNA, 151 bp, synthetic construct
  source 1..151: mol_type = other DNA
acaactggttacatcccacctttggtacatcttacaggagatgttctctgccaagtgccagcagccgtaggcacttgtgaatggttactgcccatgttgggattgttgcttcagctcccatgcacctctgagaggaagggcagtcctgctt

SEQ ID NO: 673 - DNA, 135 bp, synthetic construct
  source 1..135: mol_type = other DNA
cctcttcccaggtgctccccccagtcccaagccctcattaccctacatgcatattcatgagggatggcctccttcactactctgtaaatgggtcaaaagcaggaagtagaggccagtgcagagatctgaggccca

SEQ ID NO: 674 - DNA, 133 bp, synthetic construct
  source 1..133: mol_type = other DNA
cctgatggacatgttcagggacaggcaggccttctctgaacacacctggaagatgctcctgtctgtgtgcagatcctgggctgcctggtgcaagctgaacaacaggaaatggttccctgctgaacctgaggat

SEQ ID NO: 675 - DNA, 113 bp, synthetic construct
  source 1..113: mol_type = other DNA
cctggctgtgaagaccatccaacagcacctgggccagctcaacatgctgcacaggagatctggcctgcctcgcccttctgactccaatgctgtgtccctggtgatgaggagaa

SEQ ID NO: 676 - DNA, 136 bp, synthetic construct
  source 1..136: mol_type = other DNA
ccaagtcagatccctgatggagaactctgacagatgccaggacatcaggaacctggccttcctgggcattgcctacaacaccctgctgcgcattgccgaaattgccagaatcagagtgaaggacatctcccgcacc

SEQ ID NO: 677 - DNA, 127 bp, synthetic construct
  source 1..127: mol_type = other DNA
gtccacagctggtgtggagaaggccctgtccctgggggttaccaagctggtggagagatggatctctgtgtctggtgtggctgatgaccccaacaactacctgttctgccgggtcagaaagaatggt

SEQ ID NO: 678 - DNA, 147 bp, synthetic construct
  source 1..147: mol_type = other DNA
ccgcctgatctatggtgccaaggatgactctgggcagagatacctggcctggtctggccactctgccagagtgggtgctgccagggacatggccagggctggtgtgtccatccctgaaatcatgcaggctggtggctggaccaatgt

SEQ ID NO: 679 - DNA, 157 bp, synthetic construct
  source 1..157: mol_type = other DNA
acctggactctgagactggggccatggtgaggctgctcgaggatggggacgggtccggagccacgaacttctctctgttaaagcaagcaggagacgtggaagaaaaccccggtcctatgaaccggggagtcccttttaggcacttgcttctggtgct

SEQ ID NO: 680 - DNA, 147 bp, synthetic construct
  source 1..147: mol_type = other DNA
gtggaactgacctgtacagcttcccagaagaagagcatacaattccactggaaaaactccaaccagataaagattctgggaaatcagggctccttcttaactaaaggtccatccaagctgaatgatcgcgctgactcaagaagaagc

SEQ ID NO: 681 - DNA, 139 bp, synthetic construct
  source 1..139: mol_type = other DNA
tctgtgaagtggaggaccagaaggaggaggtgcaattgctagtgttcggattgactgccaactctgacacccacctgcttcaggggcagagcctgaccctgaccttggagagcccccctggtagtagcccctcagtgca

SEQ ID NO: 682 - DNA, 122 bp, synthetic construct
  source 1..122: mol_type = other DNA
ccgtgtctcagctggagctccaggatagtggcacctggacatgcactgtcttgcagaaccagaagaaggtggagttcaaaatagacatcgtggtgctagctttccagaaggcctccagcata

SEQ ID NO: 683 - DNA, 158 bp, synthetic construct
  source 1..158: mol_type = other DNA
cggagagggcttcctcctccaagtcttggatcacctttgacctgaagaacaaggaagtgtctgtaaaacgggttacccaggaccctaagctccagatgggcaagaagctcccgctccacctcaccctgccccaggccttgcctcagtatgctggctct

SEQ ID NO: 684 - DNA, 110 bp, synthetic construct
  source 1..110: mol_type = other DNA
gagagccactcagctccagaaaaatttgacctgtgaggtgtggggacccacctcccctaagctgatgctgagtttgaaactggagaacaaggaggcaaaggtctcgaagc

SEQ ID NO: 685 - DNA, 227 bp, synthetic construct
  source 1..227: mol_type = other DNA
ttctgcccacatggtccaccccggtgcagccaatggccctgattgtgctggggggcgtcgccggcctcctgcttttcattgggctaggcatcttcttctgtgtcaggtgccggcaccgagggtccggagagggcaggggaagtcttctaacatgcggggacgtggaggaaaatcccggccccatggacgggaggatggtgagaggattgggcatcagtgaactgtgg

SEQ ID NO: 686 - DNA, 171 bp, synthetic construct
  source 1..171: mol_type = other DNA
tagatcagagaaccctggggcaaagggtatagggaagccagggcttgcttcctacggggactagggagttgagcatggaccacacagggggatggactaaatgaccttggcaaatttttctccagtggatctggtttctgtgccattaagtggaagagctgaatccagcat

SEQ ID NO: 687 - DNA, 233 bp, synthetic construct
  source 1..233: mol_type = other DNA
ttattccagactcacaccggaggtttaagactgaggggaaggctgatgggctgaggctgctaagcaaccaagcttttcaacacccctgtggggttttgtttttgttgtttgtttgtttggttatttatttatttattatttatttttgaggcaaggtttctctgtgtagtcttggttatcttggaactcattcaagtgtgcaccactacctcctggcttgatccgcttcctaa

SEQ ID NO: 688 - DNA, 118 bp, synthetic construct
  source 1..118: mol_type = other DNA
ggctcctgagataaccagagcaaaatgtttgttcccattttacagatgagaagtgtgaggctgaaggaggaggaggtacccggacaggactacacagtgagtagtctgcacagggctg

SEQ ID NO: 689 - DNA, 1431 bp, synthetic construct
  source 1..1431: mol_type = other DNA
atggtgagcaagggcgaggaggtcatcaaagagttcatgcgcttcaaggtgcgcatggagggctccatgaacggccacgagttcgagatcgagggcgagggcgagggccgcccctacgagggcacccagaccgccaagctgaaggtgaccaagggcggccccctgcccttcgcctgggacatcctgtccccccagttcatgtacggctccaaggcgtacgtgaagcaccccgccgacatccccgattacaagaagctgtccttccccgagggcttcaagtgggagcgcgtgatgaacttcgaggacggcggtctggtgaccgtgacccaggactcctccctgcaggacggcacgctgatctacaaggtgaagatgcgcggcaccaacttcccccccgacggccccgtaatgcagaagaagaccatgggctgggaggcctccaccgagcgcctgtacccccgcgacggcgtgctgaagggcgagatccaccaggccctgaagctgaaggacggcggccactacctggtggagttcaagaccatctacatggccaagaagcccgtgcaactgcccggctactactacgtggacaccaagctggacatcacctcccacaacgaggactacaccatcgtggaacagtacgagcgctccgagggccgccaccacctgttcctggggcatggcaccggcagcaccggcagcggcagctccggcaccgcctcctccgaggacaacaacatggccgtcatcaaagagttcatgcgcttcaaggtgcgcatggagggctccatgaacggccacgagttcgagatcgagggcgagggcgagggccgcccctacgagggcacccagaccgccaagctgaaggtgaccaagggcggccccctgcccttcgcctgggacatcctgtccccccagttcatgtacggctccaaggcgtacgtgaagcaccccgccgacatccccgattacaagaagctgtccttccccgagggcttcaagtgggagcgcgtgatgaacttcgaggacggcggtctggtgaccgtgacccaggactcctccctgcaggacggcacgctgatctacaaggtgaagatgcgcggcaccaacttcccccccgacggccccgtaatgcagaagaagaccatgggctgggaggcctccaccgagcgcctgtacccccgcgacggcgtgctgaagggcgagatccaccaggccctgaagctgaaggacggcggccactacctggtggagttcaagaccatctacatggccaagaagcccgtgcaactgcccggctactactacgtggacaccaagctggacatcacctcccacaacgaggactacaccatcgtggaacagtacgagcgctccgagggccgccaccacctgttcctgtacggcatggacgagctgtacaagtag

SEQ ID NO: 690 - DNA, 711 bp, synthetic construct
  source 1..711: mol_type = other DNA
atggtgagcaagggcgaggaggataacatggccatcatcaaggagttcatgcgcttcaaggtgcacatggagggctccgtgaacggccacgagttcgagatcgagggcgagggcgagggccgcccctacgagggcacccagaccgccaagctgaaggtgaccaagggtggccccctgcccttcgcctgggacatcctgtcccctcagttcatgtacggctccaaggcctacgtgaagcaccccgccgacatccccgactacttgaagctgtccttccccgagggcttcaagtgggagcgcgtgatgaacttcgaggacggcggcgtggtgaccgtgacccaggactcctccctgcaggacggcgagttcatctacaaggtgaagctgcgcggcaccaacttcccctccgacggccccgtaatgcagaagaagaccatgggctgggaggcctcctccgagcggatgtaccccgaggacggcgccctgaagggcgagatcaagcagaggctgaagctgaaggacggcggccactacgacgctgaggtcaagaccacctacaaggccaagaagcccgtgcagctgcccggcgcctacaacgtcaacatcaagttggacatcacctcccacaacgaggactacaccatcgtggaacagtacgaacgcgccgagggccgccactccaccggcggcatggacgagctgtacaagtag

SEQ ID NO: 691 - DNA, 714 bp, synthetic construct
  source 1..714: mol_type = other DNA
atgagtaaaggagaagaacttttcactggagttgtcccaattcttgttgaattagatggtgatgttaatgggcacaaattttctgtcagtggagagggtgaaggtgatgcaacatacggaaaacttacccttaaatttatttgcactactggaaaactacctgttccatggccaacacttgtcactactttaacttatggtgttcaatgcttttcaagatacccagatcatatgaaacagcatgactttttcaagagtgccatgcccgaaggttatgtccaggaaagaactatatttttcaaagatgacgggaactacaagacacgtgctgaagtcaagtttgaaggtgatacccttgttaatagaatcgagttaaaaggtattgattttaaagaagatggaaacattcttggacacaaattggaatacaactataactcacacaatgtatacatcatggcagacaaacaaaagaatggaatcaaagttaacttcaaaattagacacaacattgaagatggaagcgttcaactagcagaccattatcaacaaaatactccaattggcgatggccctgtccttttaccagacaaccattacctgtccacacaatctgccctttcgaaagatcccaacgaaaagagagaccacatggtccttcttgagtttgtaacagctgctgggattacacatggcatggatgaactatacaaa

SEQ ID NO: 692 - DNA, 1050 bp, synthetic construct
  source 1..1050: mol_type = other DNA
ggcaagaagaagaggaaggtgtccaatttactgaccgtacaccaaaatttgcctgcattaccggtcgatgcaacgagtgatgaggttcgcaagaacctgatggacatgttcagggatcgccaggcgttttctgagcatacctggaaaatgcttctgtccgtttgccggtcgtgggcggcatggtgcaagttgaataaccggaaatggtttcccgcagaacctgaagatgttcgcgattatcttctatatcttcaggcgcgcggtctggcagtaaaaactatccagcaacatttgggccagctaaacatgcttcatcgtcggtccgggctgccacgaccaagtgacagcaatgctgtttcactggttatgcggcggatccgaaaagaaaacgttgatgccggtgaacgtgcaaaacaggctctagcgttcgaacgcactgatttcgaccaggttcgttcactcatggaaaatagcgatcgctgccaggatatacgtaatctggcatttctggggattgcttataacaccctgttacgtatagccgaaattgccaggatcagggttaaagatatctcacgtactgacggtgggagaatgttaatccatattggcagaacgaaaacgctggttagcaccgcaggtgtagagaaggcacttagcctgggggtaactaaactggtcgagcgatggatttccgtctctggtgtagctgatgatccgaataactacctgttttgccgggtcagaaaaaatggtgttgccgcgccatctgccaccagccagctatcaactcgcgccctggaagggatttttgaagcaactcatcgattgatttacggcgctaaggatgactctggtcagagatacctggcctggtctggacacagtgcccgtgtcggagccgcgcgagatatggcccgcgctggagtttcaataccggagatcatgcaagctggtggctggaccaatgtaaatattgtcatgaactatatccgtaacctggatagtgaaacaggggcaatggtgcgcctgctggaagatggcgattag

SEQ ID NO: 693 - DNA, 1056 bp, synthetic construct
  source 1..1056: mol_type = other DNA
atggtgcccaagaagaagaggaaagtctccaacctgctgactgtgcaccaaaacctgcctgccctccctgtggatgccacctctgatgaagtcaggaagaacctgatggacatgttcagggacaggcaggccttctctgaacacacctggaagatgctcctgtctgtgtgcagatcctgggctgcctggtgcaagctgaacaacaggaaatggttccctgctgaacctgaggatgtgagggactacctcctgtacctgcaagccagaggcctggctgtgaagaccatccaacagcacctgggccagctcaacatgctgcacaggagatctggcctgcctcgcccttctgactccaatgctgtgtccctggtgatgaggagaatcagaaaggagaatgtggatgctggggagagagccaagcaggccctggcctttgaacgcactgactttgaccaagtcagatccctgatggagaactctgacagatgccaggacatcaggaacctggccttcctgggcattgcctacaacaccctgctgcgcattgccgaaattgccagaatcagagtgaaggacatctcccgcaccgatggtgggagaatgctgatccacattggcaggaccaagaccctggtgtccacagctggtgtggagaaggccctgtccctgggggttaccaagctggtggagagatggatctctgtgtctggtgtggctgatgaccccaacaactacctgttctgccgggtcagaaagaatggtgtggctgccccttctgccacctcccaactgtccacccgggccctggaagggatctttgaggccacccaccgcctgatctatggtgccaaggatgactctgggcagagatacctggcctggtctggccactctgccagagtgggtgctgccagggacatggccagggctggtgtgtccatccctgaaatcatgcaggctggtggctggaccaatgtgaacatagtgatgaactacatcagaaacctggactctgagactggggccatggtgaggctgctcgaggatggggactga

SEQ ID NO: 694 - DNA, 4110 bp, synthetic construct
  source 1..4110: mol_type = other DNA
gccaccatggacaagaagtacagcatcggcctggacatcggcaccaactctgtgggctgggccgtgatcaccgacgagtacaaggtgcccagcaagaaattcaaggtgctgggcaacaccgaccggcacagcatcaagaagaacctgatcggagccctgctgttcgacagcggcgaaacagccgaggccacccggctgaagagaaccgccagaagaagatacaccagacggaagaaccggatctgctatctgcaagagatcttcagcaacgagatggccaaggtggacgacagcttcttccacagactggaagagtccttcctggtggaagaggataagaagcacgagcggcaccccatcttcggcaacatcgtggacgaggtggcctaccacgagaagtaccccaccatctaccacctgagaaagaaactggtggacagcaccgacaaggccgacctgcggctgatctatctggccctggcccacatgatcaagttccggggccacttcctgatcgagggcgacctgaaccccgacaacagcgacgtggacaagctgttcatccagctggtgcagacctacaaccagctgttcgaggaaaaccccatcaacgccagcggcgtggacgccaaggccatcctgtctgccagactgagcaagagcagacggctggaaaatctgatcgcccagctgcccggcgagaagaagaatggcctgttcggaaacctgattgccctgagcctgggcctgacccccaacttcaagagcaacttcgacctggccgaggatgccaaactgcagctgagcaaggacacctacgacgacgacctggacaacctgctggcccagatcggcgaccagtacgccgacctgtttctggccgccaagaacctgtccgacgccatcctgctgagcgacatcctgagagtgaacaccgagatcaccaaggcccccctgagcgcctctatgatcaagagatacgacgagcaccaccaggacctgaccctgctgaaagctctcgtgcggcagcagctgcctgagaagtacaaagagattttcttcgaccagagcaagaacggctacgccggctacattgacggcggagccagccaggaagagttctacaagttcatcaagcccatcctggaaaagatggacggcaccgaggaactgctcgtgaagctgaacagagaggacctgctgcggaagcagcggaccttcgacaacggcagcatcccccaccagatccacctgggagagctgcacgccattctgcggcggcaggaagatttttacccattcctgaaggacaaccgggaaaagatcgagaagatcctgaccttccgcatcccctactacgtgggccctctggccaggggaaacagcagattcgcctggatgaccagaaagagcgaggaaaccatcaccccctggaacttcgaggaagtggtggacaagggcgcttccgcccagagcttcatcgagcggatgaccaacttcgataagaacctgcccaacgagaaggtgctgcccaagcacagcctgctgtacgagtacttcaccgtgtataacgagctgaccaaagtgaaatacgtgaccgagggaatgagaaagcccgccttcctgagcggcgagcagaaaaaggccatcgtggacctgctgttcaagaccaaccggaaagtgaccgtgaagcagctgaaagaggactacttcaagaaaatcgagtgcttcgactccgtggaaatctccggcgtggaagatcggttcaacgcctccctgggcacataccacgatctgctgaaaattatcaaggacaaggacttcctggacaatgaggaaaacgaggacattctggaagatatcgtgctgaccctgacactgtttgaggacagagagatgatcgaggaacggctgaaaacctatgcccacctgttcgacgacaaagtgatgaagcagctgaagcggcggagatacaccggctggggcaggctgagccggaagctgatcaacggcatccgggacaagcagtccggcaagacaatcctggatttcctgaagtccgacggcttcgccaacagaaacttcatgcagctgatccacgacgacagcctgacctttaaagaggacatccagaaagcccaggtgtccggccagggcgatagcctgcacgagcacattgccaatctggccggcagccccgccattaagaagggcatcctgcagacagtgaaggtggtggacgagctcgtgaaagtgatgggccggcacaagcccgagaacatcgtgatcgaaatggccagagagaaccagaccacccagaagggacagaagaacagccgcgagagaatgaagcggatcgaagagggcatcaaagagctgggcagccagatcctgaaagaacaccccgtggaaaacacccagctgcagaacgagaagctgtacctgtactacctgcagaatgggcgggatatgtacgtggaccaggaactggacatcaaccggctgtccgactacgatgtggaccatatcgtgcctcagagctttctgaaggacgactccatcgacaacaaggtgctgaccagaagcgacaagaaccggggcaagagcgacaacgtgccctccgaagaggtcgtgaagaagatgaagaactactggcggcagctgctgaacgccaagctgattacccagagaaagttcgacaatctgaccaaggccgagagaggcggcctgagcgaactggataaggccggcttcatcaagagacagctggtggaaacccggcagatcacaaagcacgtggcacagatcctggactcccggatgaacactaagtacgacgagaatgacaagctgatccgggaagtgaaagtgatcaccctgaagtccaagctggtgtccgatttccggaaggatttccagttttacaaagtgcgcgagatcaacaactaccaccacgcccacgacgcctacctgaacgccgtcgtgggaaccgccctgatcaaaaagtaccctaagctggaaagcgagttcgtgtacggcgactacaaggtgtacgacgtgcggaagatgatcgccaagagcgagcaggaaatcggcaaggctaccgccaagtacttcttctacagcaacatcatgaactttttcaagaccgagattaccctggccaacggcgagatccggaagcggcctctgatcgagacaaacggcgaaaccggggagatcgtgtgggataagggccgggattttgccaccgtgcggaaagtgctgagcatgccccaagtgaatatcgtgaaaaagaccgaggtgcagacaggcggcttcagcaaagagtctatcctgcccaagaggaacagcgataagctgatcgccagaaagaaggactgggaccctaagaagtacggcggcttcgacagccccaccgtggcctattctgtgctggtggtggccaaagtggaaaagggcaagtccaagaaactgaagagtgtgaaagagctgctggggatcaccatcatggaaagaagcagcttcgagaagaatcccatcgactttctggaagccaagggctacaaagaagtgaaaaaggacctgatcatcaagctgcctaagtactccctgttcgagctggaaaacggccggaagagaatgctggcctctgccggcgaactgcagaagggaaacgaactggccctgccctccaaatatgtgaacttcctgtacctggccagccactatgagaagctgaagggctcccccgaggataatgagcagaaacagctgtttgtggaacagcacaagcactacctggacgagatcatcgagcagatcagcgagttctccaagagagtgatcctggccgacgctaatctggacaaagtgctgtccgcctacaacaagcaccgggataagcccatcagagagcaggccgagaatatcatccacctgtttaccctgaccaatctgggagcccctgccgccttcaagtactttgacaccaccatcgaccggaagaggtacaccagcaccaaagaggtgctggacgccaccctgatccaccagagcatcaccggcctgtacgagacacggatcgacctgtctcagctgggaggcgac

SEQ ID NO: 695 - DNA, 936 bp, synthetic construct
  source 1..936: mol_type = other DNA
gctggagacatgagagctgccaacctttggccaagcccgctcatgatcaaacgctctaagaagaacagcctggccttgtccctgacggccgaccagatggtcagtgccttgttggatgctgagccccccatactctattccgagtatgatcctaccagacccttcagtgaagcttcgatgatgggcttactgaccaacctggcagacagggagctggttcacatgatcaactgggcgaagagggtgccaggctttgtggatttgaccctccatgatcaggtccaccttctagaatgtgcctggctagagatcctgatgattggtctcgtctggcgctccatggagcacccagtgaagctactgtttgctcctaacttgctcttggacaggaaccagggaaaatgtgtagagggcatggtggagatcttcgacatgctgctggctacatcatctcggttccgcatgatgaatctgcagggagaggagtttgtgtgcctcaaatctattattttgcttaattctggagtgtacacatttctgtccagcaccctgaagtctctggaagagaaggaccatatccaccgagtcctggacaagatcacagacactttgatccacctgatggccaaggcaggcctgaccctgcagcagcagcaccagcggctggcccagctcctcctcatcctctcccacatcaggcacatgagtaacaaaggcatggagcatctgtacagcatgaagtgcaagaacgtggtgcccctctatgacctgctgctggaggcggcggacgcccaccgcctacatgcgcccactagccgtggaggggcatccgtggaggagacggaccaaagccacttggccactgcgggctctacttcatcgcattccttgcaaaagtattacatcacgggggaggcagagggtttccctgccaca

SEQ ID NO: 696 - DNA, 321 bp, synthetic construct
  source 1..321: mol_type = other DNA
ggcgtgcaggtcgagaccatcagccccggcgacggccgcacctttcccaagagaggccagacttgcgtggtccactacaccggcatgctggaggacggcaagaagttcgacagcagccgcgaccgcaacaagcccttcaagttcatgctgggcaaacaggaagtgatccgcggctgggaggaaggcgtggctcagatgagcgtggggcagcgggccaagctgaccatcagccccgactatgcctacggcgccaccggccaccccggcatcatccccccccacgccaccctggtgttcgacgtggagctgctgaagctggag

SEQ ID NO: 697 - DNA, 1483 bp, synthetic construct
  source 1..1483: mol_type = other DNA
cgtatgttcccatagtaacgccaatagggactttccattgacgtcaatgggtggagtatttacggtaaactgcccacttggcagtacatcaagtgtatcatatgccaagtacgccccctattgacgtcaatgacggtaaatggcccgcctggcattatgcccagtacatgaccttatgggactttcctacttggcagtacatctacgtattagtcatcgctattaccatggtcgaggtgagccccacgttctgcttcactctccccatctcccccccctccccacccccaattttgtatttatttattttttaattattttgtgcagcgatgggggcggggggggggggggggcgcgcgccaggcggggcggggcggggcgaggggcggggcggggcgaggcggagaggtgcggcggcagccaatcagagcggcgcgctccgaaagtttccttttatggcgaggcggcggcggcggcggccctataaaaagcgaagcgcgcggcgggcggggagtcgctgcgacgctgccttcgccccgtgccccgctccgccgccgcctcgcgccgcccgccccggctctgactgaccgcgttactcccacaggtgagcgggcgggacggcccttctcctccgggctgtaattagcgcttggtttaatgacggcttgtttcttttctgtggctgcgtgaaagccttgaggggctccgggagggccctttgtgcggggggagcggctcggggggtgcgtgcgtgtgtgtgtgcgtggggagcgccgcgtgcggctccgcgctgcccggcggctgtgagcgctgcgggcgcggcgcggggctttgtgcgctccgcagtgtgcgcgaggggagcgcggccgggggcggtgccccgcggtgcggggggggctgcgaggggaacaaaggctgcgtgcggggtgtgtgcgtgggggggtgagcagggggtgtgggcgcgtcggtcgggctgcaaccccccctgcacccccctccccgagttgctgagcacggcccggcttcgggtgcggggctccgtacggggcgtggcgcggggctcgccgtgccgggcggggggtggcggcaggtgggggtgccgggcggggcggggccgcctcgggccggggagggctcgggggaggggcgcggcggcccccggagcgccggcggctgtcgaggcgcggcgagccgcagccattgccttttatggtaatcgtgcgagagggcgcagggacttcctttgtcccaaatctgtgcggagccgaaatctgggaggcgccgccgcaccccctctagcgggcgcggggcgaagcggtgcggcgccggcaggaaggaaatgggcggggagggccttcgtgcgtcgccgcgccgccgtccccttctccctctccagcctcggggctgtccgcggggggacggctgccttcgggggggacggggcagggcggggttcggcttctggcgtgtgaccggcggctct

SEQ ID NO: 698 - DNA, 1172 bp, synthetic construct
  source 1..1172: mol_type = other DNA
gtgcccgtcagtgggcagagcgcacatcgcccacagtccccgagaagttggggggaggggtcggcaattgaaccggtgcctagagaaggtggcgcggggtaaactgggaaagtgatgtcgtgtactggctccgcctttttcccgagggtgggggagaaccgtatataagtgcagtagtcgccgtgaacgttctttttcgcaacgggtttgccgccagaacacaggtaagtgccgtgtgtggttcccgcgggcctggcctctttacgggttatggcccttgcgtgccttgaattacttccacctggctgcagtacgtgattcttgatcccgagcttcgggttggaagtgggtgggagagttcgaggccttgcgcttaaggagccccttcgcctcgtgcttgagttgaggcctggcctgggcgctggggccgccgcgtgcgaatctggtggcaccttcgcgcctgtctcgctgctttcgataagtctctagccatttaaaatttttgatgacctgctgcgacgctttttttctggcaagatagtcttgtaaatgcgggccaagatctgcacactggtatttcggtttttggggccgcgggcggcgacggggcccgtgcgtcccagcgcacatgttcggcgaggcggggcctgcgagcgcggccaccgagaatcggacgggggtagtctcaagctggccggcctgctctggtgcctggcctcgcgccgccgtgtatcgccccgccctgggcggcaaggctggcccggtcggcaccagttgcgtgagcggaaagatggccgcttcccggccctgctgcagggagctcaaaatggaggacgcggcgctcgggagagcgggcgggtgagtcacccacacaaaggaaaagggcctttccgtcctcagccgtcgcttcatgtgactccacggagtaccgggcgccgtccaggcacctcgattagttctcgcgcttttggagtacgtcgtctttaggttggggggaggggttttatgcgatggagtttccccacactgagtgggtggagactgaagttaggccagcttggcacttgatgtaattctccttggaatttgccctttttgagtttggatcttggttcattctcaagcctcagacagtggttcaaagtttttttcttccatttcaggtgtcgtga

SEQ ID NO: 699 - DNA, 621 bp, synthetic construct
  source 1..621: mol_type = other DNA
aagctgctgccgtcggtggtgctgaagctccttctggctgcagttctttcggcactggtgactggcgagagcctggagcagcttcggagagggctagctgctggaaccagcaacccggacccttccactggatctacggaccagctgctacgcctaggaggcggccgggaccggaaagtccgtgacttgcaagaggcagatctggaccttttgagagtcactttatcctccaagccacaagcactggccacaccaagcaaggaggagcacgggaaaagaaagaagaaaggcaagggactagggaagaagagggacccatgtcttcggaaatacaaggacttctgcatccacggagaatgcaaatatgtgaaggagctccgggctccctcctgcatctgccacccaggttaccatggagagaggtgtcatgggctgagcctcccagtggaaaatcgcttatatacctatgaccatacaactatcctggctgtggtggccgtggtgctgtcctctgtctgtctgctggtcatcgtggggcttctcatgtttaggtaccataggagaggtggttatgatgtggaaaacgaagagaaagtgaagttgggcatgactaattcccac

SEQ ID NO: 700 - DNA, 489 bp, synthetic construct
  source 1..489: mol_type = other DNA
atgaacccagccatcagcgtcgctctcctgctctcagtcttgcaggtgtcccgagggcagaaggtgaccagcctgacagcctgcctggtgaaccaaaaccttcgcctggactgccgccatgagaataacaccaaggataactccatccagcatgagttcagcctgacccgagagaagaggaagcacgtgctctcaggcacccttgggatacccgagcacacgtaccgctcccgcgtcaccctctccaaccagccctatatcaaggtccttaccctagccaacttcaccaccaaggatgagggcgactacttttgtgagcttcgcgtctcgggcgcgaatcccatgagctccaataaaagtatcagtgtgtatagagacaagctggtcaagtgtggcggcataagcctgctggttcagaacacatcctggatgctgctgctgctgctttccctctccctcctccaagccctggacttcatttctctgtga

SEQ ID NO: 701 - DNA, 567 bp, synthetic construct
  source 1..567: mol_type = other DNA
tccctcccccccccctaacgttactggccgaagccgcttggaataaggccggtgtgcgtttgtctatatgttattttccaccatattgccgtcttttggcaatgtgagggcccggaaacctggccctgtcttcttgacgagcattcctaggggtctttcccctctcgccaaaggaatgcaaggtctgttgaatgtcgtgaaggaagcagttcctctggaagcttcttgaagacaaacaacgtctgtagcgaccctttgcaggcagcggaaccccccacctggcgacaggtgcctctgcggccaaaagccacgtgtataagatacacctgcaaaggcggcacaaccccagtgccacgttgtgagttggatagttgtggaaagagtcaaatggctctcctcaagcgtattcaacaaggggctgaaggatgcccagaaggtaccccattgtatgggatctgatctggggcctcggtgcacatgctttacatgtgtttagtcgaggttaaaaaacgtctaggccccccgaaccacggggacgtggttttcctttgaaaaacacgatgataa

SEQ ID NO: 702 - DNA, 1023 bp, synthetic construct
  source 1..1023: mol_type = other DNA
tcagagctcatcatctctggcagttccgggggctttctgaggaatattggaaaagagtaccaggaggcagccgaaaatttcatgaggttcatgaacgatcaaggtgcatatgcccccaacaccctgagggatctgcgtctcgtctttcactcttgggcaaggtggtgtcatgctcgtcaactggcgtggtttcctatcagccccgaaatggcgcgggaatacttcctgcagcttcacgacgctgacctggcaagcactacgattgataagcattacgcaatgctgaatatgctgctctcacattgtgggttgcctccactgagcgacgacaagtctgtctcattggctatgaggcgaatcaggcgggaagcagctaccgagaagggtgaaaggactggacaggctatccccctgagatgggacgacctgaagctgctggatgtactgctcagcagaagcgaacggctggtggatctcaggaaccgagcgtttctttttgtggcatataacaccctgatgcgtatgtctgagatctcacggattcgggttggggacctagaccagacaggcgataccgtgaccctacacatctcacacacaaaaactatcactactgcggctgggctggacaaagtgctttccagacgtacgaccgccgtgctgaacgattggcttgacgtaagtggccttcgggagcatccagacgccgtgctgtttccccccatccatagatctaacaaggctcgaattacaactactcctctgaccgcgcccgctatggagaagatcttctccgatgcttgggtcctcctgaacaagagagacgctacccctaataagggaaggtacagaacttggacgggtcattctgccagagtaggtgccgcaatcgacatggccgagaagcaggtgtccatggtggagattatgcaggaggggacctggaaaaaacctgaaacccttatgaggtacctgcgaagaggtggggtgagtgtgggcgctaacagtaggctgatggacagt

SEQ ID NO: 703 - DNA, 208 bp, synthetic construct
  source 1..208: mol_type = other DNA
ctgtgccttctagttgccagccatctgttgtttgcccctcccccgtgccttccttgaccctggaaggtgccactcccactgtcctttcctaataaaatgaggaaattgcatcgcattgtctgagtaggtgtcattctattctggggggtggggtggggcaggacagcaagggggaggattgggaagacaatagcaggcatgctgggga

SEQ ID NO: 704 - DNA, 905 bp, synthetic construct
  source 1..905: mol_type = other DNA
ataacttcgtataatgtatgctatacgaagttattcgcgatgaataaatgaaagcttgcagatctgcgactctagaggatctgcgactctagaggatcataatcagccataccacattttgtagaggttttacttgctttaaaaaacctcccacacctccccctgaacctgaaacataaaatgaatgcaattgttgttgttaacttgtttattgcagcttataatggttacaaataaagcaatagcatcacaaatttcacaaataaagcatttttttcactgcattctagttgtggtttgtccaaactcatcaatgtatcttatcatgtctggatctgcgactctagaggatcataatcagccataccacatttgtagaggttttacttgctttaaaaaacctcccacacctccccctgaacctgaaacataaaatgaatgcaattgttgttgttaacttgtttattgcagcttataatggttacaaataaagcaatagcatcacaaatttcacaaataaagcatttttttcactgcattctagttgtggtttgtccaaactcatcaatgtatcttatcatgtctggatctgcgactctagaggatcataatcagccataccacatttgtagaggttttacttgctttaaaaaacctcccacacctccccctgaacctgaaacataaaatgaatgcaattgttgttgttaacttgtttattgcagcttataatggttacaaataaagcaatagcatcacaaatttcacaaataaagcatttttttcactgcattctagttgtggtttgtccaaactcatcaatgtatcttatcatgtctggatccccatcaagctgatccggaacccttaatataacttcgtataatgtatgctatacgaagtta

SEQ ID NO: 705 - DNA, 130 bp, synthetic construct
  source 1..130: mol_type = other DNA
ctgcgcgctcgctcgctcactgaggccgcccgggcaaagcccgggcgtcgggcgacctttggtcgcccggcctcagtgagcgagcgagcgcgcagagagggagtggccaactccatcactaggggttcct

SEQ ID NO: 706 - DNA, 600 bp, synthetic construct
  source 1..600: mol_type = other DNA
atgaccgagtacaagcccacggtgcgcctcgccacccgcgacgacgtccccagggccgtacgcaccctcgccgccgcgttcgccgactaccccgccacgcgccacaccgtcgatccggaccgccacatcgagcgggtcaccgagctgcaagaactcttcctcacgcgcgtcgggctcgacatcggcaaggtgtgggtcgcggacgacggcgccgcggtggcggtctggaccacgccggagagcgtcgaagcgggggcggtgttcgccgagatcggcccgcgcatggccgagttgagcggttcccggctggccgcgcagcaacagatggaaggcctcctggcgccgcaccggcccaaggagcccgcgtggttcctggccaccgtcggcgtctcgcccgaccaccagggcaagggtctgggcagcgccgtcgtgctccccggagtggaggcggccgagcgcgccggggtgcccgccttcctggagacctccgcgccccgcaacctccccttctacgagcggctcggcttcaccgtcaccgccgacgtcgagtgcccgaaggaccgcgcgacctggtgcatgacccgcaagcccggtgcctga

SEQ ID NO: 707 - DNA, 399 bp, synthetic construct
  source 1..399: mol_type = other DNA
atggccaagcctttgtctcaagaagaatccaccctcattgaaagagcaacggctacaatcaacagcatccccatctctgaagactacagcgtcgccagcgcagctctctctagcgacggccgcatcttcactggtgtcaatgtatatcattttactgggggaccttgtgcagaactcgtggtgctgggcactgctgctgctgcggcagctggcaacctgacttgtatcgtcgcgatcggaaatgagaacaggggcatcttgagcccctgcggacggtgccgacaggtgcttctcgatctgcatcctgggatcaaagccatagtgaaggacagtgatggacagccgacggcagttgggattcgtgaattgctgccctctggttatgtgtgggagggctaa

SEQ ID NO: 708 - DNA, 488 bp, synthetic construct
  source 1..488: mol_type = other DNA
acagaaaagagaccactaactcagctaggttttcccaattcctcaacactttggggcacagtgtttagtcagagctgtgatcactctctgagcacatggattgtatcttaattttcatctcattgaaaatatgtaccatttgtccaagtggaaactgggctgaagcatgactgtgaccaccaccaaagaaatggctagactcgctaaggtctgctggggtgacccgtgattgtgttgtgcttgatcttgttgagcatggctcttttaagtcaccatacctgcccctgccaatgcaccaaacaccaacttaaagggactttcagcttttgtaagtcagtctcagccttacttctgaaccatttctttgacttctttcatgactctgatcctgtcccagttttaagcctcccagccaccagtcatgctgttttgctctgctatttacattcttctctacctactttggacttgatggtatgcctactata

SEQ ID NO: 709 - DNA, 1108 bp, synthetic construct
  source 1..1108: mol_type = other DNA
gagaagggagcggaaaagtctccaccggacgcggccatggctcgggggggggggggcagcggaggagcgcttccggccgacgtctcgtcgctgattggcttcttttcctcccgccgtgtgtgaaaacacaaatggcgtgttttggttggcgtaaggcgcctgtcagttaacggcagccggagtgcgcagccgccggcagcctcgctctgcccactgggtggggcgggaggtaggtggggtgaggcgagctggacgtgcgggcgcggtcggcctctggcggggcgggggaggggagggagggtcagcgaaagtagctcgcgcgcgagcggccgcccaccctccccttcctctgggggagtcgttttacccgccgccggccgggcctcgtcgtctgattggctctcggggcccagaaaactggcccttgccattggctcgtgttcgtgcaagttgagtccatccgccggccagcgggggcggcgaggaggcgctcccaggttccggccctcccctcggccccgcgccgcagagtctggccgcgcgcccctgcgcaacgtggcaggaagcgcgcgctgggggcggggacgggcagtagggctgagcggctgcggggcgggtgcaagcacgtttccgacttgagttgcctcaagaggggcgtgctgagccagacctccatcgcgcactccggggagtggagggaaggagcgagggctcagttgggctgttttggaggcaggaagcacttgctctcccaaagtcgctctgagttgttatcagtaagggagctgcagtggagtaggcggggagaaggccgcacccttctccggaggggggaggggagtgttgcaatacctttctgggagttctctgctgcctcctggcttctgaggaccgccctgggcctgggagaatcccttccccctcttccctcgtgatctgcaactccagtctttctagaagatgggcgggagtcttctgggcaggcttaaaggctaacctggtgtgtgggcgttgtcctgcaggggaattgaacaggtgtaaaattggagggacaagacttcccacagattttcggttttgtcgggaagttttttaataggggcaaata

SEQ ID NO: 710 - DNA, 1104 bp, synthetic construct
  source 1..1104: mol_type = other DNA
ctgccctcctctcgcccccgagtgcccttgctgtgccgccggaactctgccctctaacgctgccgtctctctcctgagtccggaccactttgagctctactggcttctgcgccgcctctggcccactgtttccccttcccaggcaggtcctgctttctctgacctgcattctctcccctgggcctgtgccgctttctgtctgcagcttgtggcctgggtcacctctacggctggcccagatccttccctgccgcctccttcaggttccgtcttcctccactccctcttccccttgctctctgctgtgttgctgcccaaggatgctctttccggagcacttccttctcggcgctgcaccacgtgatgtcctctgagcggatcctccccgtgtctgggtcctctccgggcatctctcctccctcacccaaccccatgccgtcttcactcgctgggttcccttttccttctccttctggggcctgtgccatctctcgtttcttaggatggccttctccgacggatgtctcccttgcgtcccgcctccccttcttgtaggcctgcatcatcaccgtttttctggacaaccccaaagtaccccgtctccctggctttagccacctctccatcctcttgctttctttgcctggacaccccgttctcctgtggattcgggtcacctctcactcctttcatttgggcagctcccctaccccccttacctctctagtctgtgctagctcttccagccccctgtcatggcatcttccaggggtccgagagctcagctagtcttcttcctccaacccgggcccctatgtccacttcaggacagcatgtttgctgcctccagggatcctgtgtccccgagctgggaccaccttatattcccagggccggttaatgtggctctggttctgggtacttttatctgtcccctccaccccacagtggggccactagggacaggattggtgacagaaaagccccatccttaggcctcctccttcctagtctcctgatattgggtctaacccccacctcctgttaggcagattccttatctggtgacacacccccatttcctggagccatctctctccttgc

SEQ ID NO: 711 - DNA, 120 bp, synthetic construct
  source 1..120: mol_type = other DNA
ggacagccagtttcatttctcctcagagaactacaggataaggtaccacaactcccaggattttcctggatcaaaccttgtatctcttctgcaagtattgtgtatattggtctgagagac

SEQ ID NO: 712 - DNA, 228 bp, synthetic construct
  source 1..228: mol_type = other DNA
cactctttccctacacgacgctcttccgatctgtaggtggggtgaggcgaggtaggtggggtgaggcgagctggacgtgcgggcgcggtcggcctctggcggggcgggggaggggagggagggtcagcgaaagtagctcgcgcgcgagcggccgcccaccctccccttcctctgggccctccccttcctctgggagatcggaagagcacacgtctgaactccagtcac

SEQ ID NO: 713 - DNA, 238 bp, synthetic construct
  source 1..238: mol_type = other DNA
cactctttccctacacgacgctcttccgatcttgcgcaacgtggcaggaagtgcgcaacgtggcaggaagcgcgcgctgggggcggggacgggcagtagggctgagcggctgcggggcgggtgcaagcacgtttccgacttgagttgcctcaagaggggcgtgctgagccagacctccatcgcgcaccagacctccatcgcgcaagatcggaagagcacacgtctgaactccagtcac

SEQ ID NO: 714 - DNA, 260 bp, synthetic construct
  source 1..260: mol_type = other DNA
cactctttccctacacgacgctcttccgatctcttctgaggaccgccctgcttctgaggaccgccctgggcctgggagaatcccttccccctcttccctcgtgatctgcaactccagtctttctagttaattaaccgtttaaacaattctgcaggaatctagttattaatagtaatcaattacggggtcattagttcatagcctacggggtcattagttcatagccagatcggaagagcacacgtctgaactccagtcac

SEQ ID NO: 715 - DNA, 245 bp, synthetic construct
  source 1..245: mol_type = other DNA
cactctttccctacacgacgctcttccgatctcatatgccaagtacgcccctcatatgccaagtacgccccctattgacgtcaatgacggtaaatggcccgcctggcattatgcccagtacatgaccttatgggactttcctacttggcagtacatctacgtattagtcatcgctattaccatggtcgaggcgctattaccatggtcgaggagatcggaagagcacacgtctgaactccagtcac

SEQ ID NO: 716 - DNA, 281 bp, synthetic construct
  source 1..281: mol_type = other DNA
cactctttccctacacgacgctcttccgatctgcgcgctccgaaagtttccgcgcgctccgaaagtttccttttatggcgaggcggcggcggcggcggccctataaaaagcgaagcgcgcggcgggcggggagtcgctgcgacgctgccttcgccccgtgccccgctccgccgccgcctcgcgccgcccgccccggctctgactgaccgcgttactcccacaggtgacgcgttactcccacaggtgaagatcggaagagcacacgtctgaactccagtcac

SEQ ID NO: 717 - DNA, 235 bp, synthetic construct
  source 1..235: mol_type = other DNA
cactctttccctacacgacgctcttccgatctggggctttgtgcgctccgggggctttgtgcgctccgcagtgtgcgcgaggggagcgcggccgggggcggtgccccgcggtgcggggggggctgcgaggggaacaaaggctgcgtgcggggtgtgtgcgtgggggggtgagcagggggtgtggggtgagcagggggtgtgagatcggaagagcacacgtctgaactccagtcac

SEQ ID NO: 718 - DNA, 221 bp, synthetic construct
  source 1..221: mol_type = other DNA
cactctttccctacacgacgctcttccgatctgcgccggcggctgtcgaggcgccggcggctgtcgaggcgcggcgagccgcagccattgccttttatggtaatcgtgcgagagggcgcagggacttcctttgtcccaaatctgtgcggagccgaaatctgggaggcggagccgaaatctgggaggcagatcggaagagcacacgtctgaactccagtcac

SEQ ID NO: 719 - DNA, 241 bp, synthetic construct
  source 1..241: mol_type = other DNA
cactctttccctacacgacgctcttccgatctctagagcctctgctaaccatgctctagagcctctgctaaccatgttcatgccttcttctttttcctacagctcctgggcaacgtgctggttattgtgctgtctcatcattttggcaaagaattgatttgataccgcgggccctaagaagttcctacgggccctaagaagttcctaagatcggaagagcacacgtctgaactccagtcac

SEQ ID NO: 720 - DNA, 265 bp, synthetic construct
  source 1..265: mol_type = other DNA
cactctttccctacacgacgctcttccgatcttctagactcgagtggatccgttctagactcgagtggatccgccaccatgagtggtcccctagaaggggccgatgggggaggagaccccaggcccggagaacctttttgtcctggaggagtcccatcccctggggccccgcagcaccggccttgtccaggccccagcctggctgatgacacccagcctggctgatgacacagatcggaagagcacacgtctgaactccagtcac

SEQ ID NO: 721 - DNA, 229 bp, synthetic construct
  source 1..229: mol_type = other DNA
cactctttccctacacgacgctcttccgatctgtgcgagctcagagcagggtgcgagctcagagcaggacaacccatctaccagtggctgcagcagtgaacagtcagctcgagccaggacccagaaagaactcatgactgcacttcgggagctcaaacttcgactgccaccagagccttcgactgccaccagagcagatcggaagagcacacgtctgaactccagtcac

SEQ ID NO: 722 - DNA, 228 bp, synthetic construct
  source 1..228: mol_type = other DNA
cactctttccctacacgacgctcttccgatctccttctctgtggctgtgtccccttctctgtggctgtgtccttcctgacaggccggattgtctatatttcggagcaggcaggtgtcctgctgcgttgcaaacgggatgtgtttcggggtgcccgcttctcagagctcctggctccctcagagctcctggctccagatcggaagagcacacgtctgaactccagtcac

SEQ ID NO: 723 - DNA, 243 bp, synthetic construct
  source 1..243: mol_type = other DNA
cactctttccctacacgacgctcttccgatcttcgggtctcagatggagccttcgggtctcagatggagcccctgcacagccgtgctgcctactcattgccgagcgcatccactctggttatgaagctccccggatccctcctgacaagaggatcttcaccacccgacacacaccaagctgcctcttccacaccaagctgcctcttccaagatcggaagagcacacgtctgaactccagtcac

SEQ ID NO: 724 - DNA, 235 bp, synthetic construct
  source 1..235: mol_type = other DNA
cactctttccctacacgacgctcttccgatctccgcaaggtggctttcgtgccgcaaggtggctttcgtgttgggtcgccataaagtgcgcacggcacccctgaatgaggacgtcttcactcccccagcccccagcccagctccgtccctggactctgatatccaggagctctcagagcagaccaggagctctcagagcagagatcggaagagcacacgtctgaactccagtcac

SEQ ID NO: 725 - DNA, 243 bp, synthetic construct
  source 1..243: mol_type = other DNA
cactctttccctacacgacgctcttccgatcttcttcattgaatctcgggcctcttcattgaatctcgggccaagcccccaccccggccccgcctccttgctacaggtacattcaaagccaaagtccttccctgccagtccccaaaccccgaactggaggtggccccagttcctgaccaagcctcgttagcctgaccaagcctcgttagagatcggaagagcacacgtctgaactccagtcac

SEQ ID NO: 726 - DNA, 244 bp, synthetic construct
  source 1..244: mol_type = other DNA
cactctttccctacacgacgctcttccgatctcaggtccagttcctgtgggcaggtccagttcctgtgggggccaagaaagatccgtcgtcagcaatgctgtctggggagggggcaactcctcggaaggagccagtggtgggaggcaccctgagcccgctcgccctggccaataaggcagagagcgtggtgtaaggcagagagcgtggtgagatcggaagagcacacgtctgaactccagtcac

SEQ ID NO: 727 - DNA, 269 bp, synthetic construct
  source 1..269: mol_type = other DNA
cactctttccctacacgacgctcttccgatctgctgtccctgcacacacagtgctgtccctgcacacacagaaggaagagcaagccttcctcaaccgcttcagagatcttggcaggcttcgtggacttgacacctcttctgtggccccctcagcccctggctgccaccatggccccattccccctggtcgccgacaccactgccgatctaaagcacaccactgccgatctaaagcagatcggaagagcacacgtctgaactccagtcac

SEQ ID NO: 728 - DNA, 255 bp, synthetic construct
  source 1..255: mol_type = other DNA
cactctttccctacacgacgctcttccgatctatctgtgtcccctgctaccatctgtgtcccctgctaccttcccttctcccttagtgaccccaatggtggccttggtgctccctaactatctattccctaccccacctagttatccatatggggtgtcccaggcccctgttgaggggccacccacgcctgcttcccactcgcacgcctgcttcccactcgagatcggaagagcacacgtctgaactccagtcac

SEQ ID NO: 729 - DNA, 277 bp, synthetic construct
  source 1..277: mol_type = other DNA
cactctttccctacacgacgctcttccgatcttgctgagccagaggccagatgctgagccagaggccagattggtggaggttactgagtcgtccaatcaggatgcactttcaggctccagcgacctgctggagctactgctccaagaagactctcgctcgggcacaggctccgcagcctcaggctccctgggctctggcctgggctctgggtctggttcaggagctctgggtctggttcaggaagatcggaagagcacacgtctgaactccagtcac

SEQ ID NO: 730 - DNA, 234 bp, synthetic construct
  source 1..234: mol_type = other DNA
cactctttccctacacgacgctcttccgatctcataccaggtgccgtccagcataccaggtgccgtccagggatgcagcctctgtgctgaagcaagaccgggagaggctccgggccatgcagaaacagcagccacggttctcagaggaccagaggcgggaactgggtgctgtgcactcctggggtgctgtgcactcctggagatcggaagagcacacgtctgaactccagtcac

SEQ ID NO: 731 - DNA, 250 bp, synthetic construct
  source 1..250: mol_type = other DNA
cactctttccctacacgacgctcttccgatcttgccttctagttgccagcctgccttctagttgccagccatctgttgtttgcccctcccccgtgccttccttgaccctggaaggtgccactcccactgtcctttcctaataaaatgaggaaattgcatcgcattgtctgagtaggtgtcattctattctgggggggtgtcattctattctgggggagatcggaagagcacacgtctgaactccagtcac

SEQ ID NO: 732 - DNA, 241 bp, synthetic construct
  source 1..241: mol_type = other DNA
cactctttccctacacgacgctcttccgatctactggcttatccaacccctagtactggcttatccaacccctagacagagcattggcattttccctttcctgatcttagaagtctgatgactcatgaaaccagacagattagttacatacaccacaaatcgaggctgtagctggggcctcaacactgtagctggggcctcaacactagatcggaagagcacacgtctgaactccagtcac

SEQ ID NO: 733 - DNA, 229 bp, synthetic construct
  source 1..229: mol_type = other DNA
cactctttccctacacgacgctcttccgatcttttccaggtggatgtctcctctttccaggtggatgtctcctcccccaatattacctgatgtatcttacatattgccaggctgatattttaagacattaaaaggtatatttcattattgagccacatggtattgattactggagccacatggtattgattactgagatcggaagagcacacgtctgaactccagtcac

SEQ ID NO: 734 - DNA, 223 bp, synthetic construct
  source 1..223: mol_type = other DNA
cactctttccctacacgacgctcttccgatctgcctcgtcgtctgattggcgcctcgtcgtctgattggctctcggggcccagaaaactggcccttgccattggctcgtgttcgtgcaagttgagtccatccgccggccagcgggggcggcgaggaggcgctcccaggttgaggaggcgctcccaggttagatcggaagagcacacgtctgaactccagtcac

SEQ ID NO: 735 - DNA, 246 bp, synthetic construct
  source 1..246: mol_type = other DNA
cactctttccctacacgacgctcttccgatctgagggctcagttgggctggagggctcagttgggctgttttggaggcaggaagcacttgctctcccaaagtcgctctgagttgttatcagtaagggagctgcagtggagtaggcggggagaaggccgcacccttctccggaggggggaggggagtgttgcaaggggaggggagtgttgcaaagatcggaagagcacacgtctgaactccagtcac

SEQ ID NO: 736 - DNA, 253 bp, synthetic construct
  source 1..253: mol_type = other DNA
cactctttccctacacgacgctcttccgatctaacttacggtaaatggcccgtaacttacggtaaatggcccgcctggctgaccgcccaacgacccccgcccattgacgtcaataatgacgtatgttcccatagtaacgccaatagggactttccattgacgtcaatgggtggagtatttacggtaaactgcccacttggcggtaaactgcccacttggagatcggaagagcacacgtctgaactccagtcac

SEQ ID NO: 737 - DNA, 271 bp, synthetic construct
  source 1..271: mol_type = other DNA
cactctttccctacacgacgctcttccgatcttctgcttcactctccccatcttctgcttcactctccccatctcccccccctccccacccccaattttgtatttatttattttttaattattttgtgcagcgatgggggcggggggggggggggggcgcgcgccaggcggggcggggcggggcgaggggcggggcggggcgaggcggagaggtgcggcgaggcggagaggtgcggcagatcggaagagcacacgtctgaactccagtcac

SEQ ID NO: 738 - DNA, 236 bp, synthetic construct
  source 1..236: mol_type = other DNA
cactctttccctacacgacgctcttccgatcttccgggctgtaattagcgctccgggctgtaattagcgcttggtttaatgacggcttgtttcttttctgtggctgcgtgaaagccttgaggggctccgggagggccctttgtgcggggggagcggctcggggggtgcgtgcgtgtgtgtgtggtgcgtgcgtgtgtgtgtgagatcggaagagcacacgtctgaactccagtcac

SEQ ID NO: 739 - DNA, 276 bp, synthetic construct
  source 1..276: mol_type = other DNA
cactctttccctacacgacgctcttccgatctctgcaaccccccctgcacctgcaaccccccctgcacccccctccccgagttgctgagcacggcccggcttcgggtgcggggctccgtacggggcgtggcgcggggctcgccgtgccgggcggggggtggcggcaggtgggggtgccgggcggggcggggccgcctcgggccggggagggctcgggggagggggagggctcgggggaggggagatcggaagagcacacgtctgaactccagtcac

SEQ ID NO: 740 - DNA, 254 bp, synthetic construct
  source 1..254: mol_type = other DNA
cactctttccctacacgacgctcttccgatctgccggcaggaaggaaatggggccggcaggaaggaaatgggcggggagggccttcgtgcgtcgccgcgccgccgtccccttctccctctccagcctcggggctgtccgcggggggacggctgccttcgggggggacggggcagggcggggttcggcttctggcgtgtgaggttcggcttctggcgtgtgagatcggaagagcacacgtctgaactccagtcac

SEQ ID NO: 741 - DNA, 244 bp, synthetic construct
  source 1..244: mol_type = other DNA
cactctttccctacacgacgctcttccgatctgcaatgagtccaacggaccgcaatgagtccaacggacccgagtccaggggcgcatctcagcggagttctcatagttcctcttctggcaatggcaaggactcagctctgctggagaccactgagagcagcaagagtacaaactcacagagcccatccccactcacagagcccatccccaagatcggaagagcacacgtctgaactccagtcac

SEQ ID NO: 742 - DNA, 253 bp, synthetic construct
  source 1..253: mol_type = other DNA
cactctttccctacacgacgctcttccgatcttctgggaccttggccacactctgggaccttggccacactgcagtacgctctggcctgtgtcaagcaggttcaggctaaccaggaatattaccagcagtggagtctggaggagggtgagccttgtgccatggacatgtctacttacaccctggaggaattggagcataccctggaggaattggagcatagatcggaagagcacacgtctgaactccagtcac

SEQ ID NO: 743 - DNA, 239 bp, synthetic construct
  source 1..239: mol_type = other DNA
cactctttccctacacgacgctcttccgatctaccatctcgactgcccaccaccatctcgactgcccacctggggcactggcacctctgcaggttcaggtctcaaggacttcacccaggaaaagtctgtcttctgccgaatcagaggaggtcctgaccgggatccagggcctcggtaccagccattggcctcggtaccagccattagatcggaagagcacacgtctgaactccagtcac

SEQ ID NO: 744 - DNA, 219 bp, synthetic construct
  source 1..219: mol_type = other DNA
cactctttccctacacgacgctcttccgatctactgctgggttaccttcccactgctgggttaccttccccaggatctcctgggggctccagtacttctctttctacatcctgaggaccgacccctcatgctggccattcataagaagatactgcagctggcaggcgatactgcagctggcaggcagatcggaagagcacacgtctgaactccagtcac

SEQ ID NO: 745 - DNA, 204 bp, synthetic construct
  source 1..204: mol_type = other DNA
cactctttccctacacgacgctcttccgatctctgtgcacagctccagccctgtgcacagctccagccccacggggctctgtggagttggccctctgatgtcccctggtcctctacacagccctggctcctccagtgatagcaatggggcctccagtgatagcaatggggagatcggaagagcacacgtctgaactccagtcac

SEQ ID NO: 746 - DNA, 238 bp, synthetic construct
  source 1..238: mol_type = other DNA
cactctttccctacacgacgctcttccgatctctctggctgttcctaccagcctctggctgttcctaccagcagatcaactgcctggacagcatcctcaggtatttggagagctgcaacattcccagtacaaccaagcgtaaatgtgcctcctcctcctcctacactgcctcttcagcctctgacactgcctcttcagcctctgagatcggaagagcacacgtctgaactccagtcac

SEQ ID NO: 747 - DNA, 228 bp, synthetic construct
  source 1..228: mol_type = other DNA
cactctttccctacacgacgctcttccgatctaccatcgtccatgtgggagaccatcgtccatgtgggagacaagaagcccccggagtcggacatcatcatgatggaagacctgcctggcctggcccctggcccagcccccagtccggcccccagccccacagtagcccctgacccccacagtagcccctgaccagatcggaagagcacacgtctgaactccagtcac

SEQ ID NO: 748 - DNA, 237 bp, synthetic construct
  source 1..237: mol_type = other DNA
cactctttccctacacgacgctcttccgatctgcccgaaactccctgctatggcccgaaactccctgctatgtctcccatccttcacctgtgccctcttctggaccctggccacccccaccagccacgacccccttcccagcaatggtccagccctacccactcccagtattctcccctcgagcccagtattctcccctcgagagatcggaagagcacacgtctgaactccagtcac

SEQ ID NO: 749 - DNA, 224 bp, synthetic construct
  source 1..224: mol_type = other DNA
cactctttccctacacgacgctcttccgatcttccccactgttcaactcgagtccccactgttcaactcgagatgcagctccccactccagctcaatctgctgcagcttgaggagtccccccgcacggaggggggcgctgctgcaggaggcccaggaagcagtgctgggcccggaagcagtgctgggcccagatcggaagagcacacgtctgaactccagtcac

SEQ ID NO: 750 - DNA, 240 bp, synthetic construct
  source 1..240: mol_type = other DNA
cactctttccctacacgacgctcttccgatctccgcagcagtcagagcagcccgcagcagtcagagcagccatacaagcaagtactttggcagcatcgactcttccgaggctgaagctggggctgctcgggccaggactgagcctggggaccaggtcattaagtgtgtgctccaggaccccatctgggctccaggaccccatctggagatcggaagagcacacgtctgaactccagtcac

SEQ ID NO: 751 - DNA, 247 bp, synthetic construct
  source 1..247: mol_type = other DNA
cactctttccctacacgacgctcttccgatctcccttgatgtgacggcgtgcccttgatgtgacggcgtgtgtggactgtggcagcagcgttcaagatcctggccactctgatgaccccctcttctcagaactggatggattggggctggagcccatggaagagggtggaggcgagggtggtgggtgtggtgtgagggtggtgggtgtggtgtagatcggaagagcacacgtctgaactccagtcac

SEQ ID NO: 752 - DNA, 197 bp, synthetic construct
  source 1..197: mol_type = other DNA
cactctttccctacacgacgctcttccgatctggggctaagggttcaagctctggggctaagggttcaagctctcaggactctgccatggaggaagaagagcaaggtgggggctcatccagcccagctttacctgcagaagagcccagctttacctgcagaagagatcggaagagcacacgtctgaactccagtcac

SEQ ID NO: 753 - DNA, 259 bp, synthetic construct
  source 1..259: mol_type = other DNA
cactctttccctacacgacgctcttccgatctcaagggggaggattgggaagcaagggggaggattgggaagacaatagcaggcatgctggggatgcggtgggctctataattcacagtgtcgcgagttagactatgtaagcagaattttaatcatttttaaagagcccagtacttcatatccatttctcccgctccttctgcagcccccgctccttctgcagccagatcggaagagcacacgtctgaactccagtcac

SEQ ID NO: 754 - DNA, 268 bp, synthetic construct
  source 1..268: mol_type = other DNA
cactctttccctacacgacgctcttccgatcttgttgatcctttgccttgatccttgttgatcctttgccttgatccttaattttcagtgtctatcacctctcccgtcaggtggtgttccacatttgggcctattctcagtccagggagttttacaacaatagatgtattgagaatccaacctaaagcttaactttccactcccatgaatgcctcccactcccatgaatgcctcagatcggaagagcacacgtctgaactccagtcac

SEQ ID NO: 755 - DNA, 245 bp, synthetic construct
  source 1..245: mol_type = other DNA
cactctttccctacacgacgctcttccgatctcttttggaatgcaaagttcaggtgcttttggaatgcaaagttcaggtgtttgttgtctttcctgacctaaggtcttgtgagcttgtattttttctatttaagcagtgctttctcttggactggcttgactcatggcattctacacgttattgctggggcattctacacgttattgctggagatcggaagagcacacgtctgaactccagtcac

SEQ ID NO: 756 - DNA, 230 bp, synthetic construct
  source 1..230: mol_type = other DNA
cactctttccctacacgacgctcttccgatcttgccaagcttcttcaggaccttgccaagcttcttcaggacctataattttgcttgacttgtagccaaacacaagtaaaatgattaagcaacaaatgtatttgtgaagcttggtttttaggttgttgtgttgtgtgtgcttgtggttgtgttgtgtgtgcttgtgagatcggaagagcacacgtctgaactccagtcac

SEQ ID NO: 757 - DNA, 556 bp, synthetic construct
  source 1..556: mol_type = other DNA
cactctttccctacacgacgctcttccgatctgtaggtggggtgaggcgaggtaggtggggtgaggcgagctggacgtgcgggcgcggtcggcctctggcggggcgggggaggggagggagggtcagcgaaagtagctcgcgcgcgagcggccgcccaccctccccttcctctgggggagtcgttttacccgccgccggccgggcctcgtcgtctgattggctctcggggcccagaaaactggcccttgccattggctcgtgttcgtgcaagttgagtccatccgccggccagcgggggcggcgaggaggcgctcccaggttccggccctcccctcggccccgcgccgcagagtctggccgcgcgcccctgcgcaacgtggcaggaagcgcgcgctgggggcggggacgggcagtagggctgagcggctgcggggcgggtgcaagcacgtttccgacttgagttgcctcaagaggggcgtgctgagccagacctccatcgcgcaccagacctccatcgcgcaagatcggaagagcacacgtctgaactccagtcac

SEQ ID NO: 758 - DNA, 616 bp, synthetic construct
  source 1..616: mol_type = other DNA
cactctttccctacacgacgctcttccgatctcatatgccaagtacgcccctcatatgccaagtacgccccctattgacgtcaatgacggtaaatggcccgcctggcattatgcccagtacatgaccttatgggactttcctacttggcagtacatctacgtattagtcatcgctattaccatggtcgaggtgagccccacgttctgcttcactctccccatctcccccccctccccacccccaattttgtatttatttattttttaattattttgtgcagcgatgggggcggggggggggggggggcgcgcgccaggcggggcggggcggggcgaggggcggggcggggcgaggcggagaggtgcggcggcagccaatcagagcggcgcgctccgaaagtttccttttatggcgaggcggcggcggcggcggccctataaaaagcgaagcgcgcggcgggcggggagtcgctgcgacgctgccttcgccccgtgccccgctccgccgccgcctcgcgccgcccgccccggctctgactgaccgcgttactcccacaggtgacgcgttactcccacaggtgaagatcggaagagcacacgtctgaactccagtcac

SEQ ID NO: 759 - DNA, 554 bp, synthetic construct
  source 1..554: mol_type = other DNA
cactctttccctacacgacgctcttccgatctgcgccggcggctgtcgaggcgccggcggctgtcgaggcgcggcgagccgcagccattgccttttatggtaatcgtgcgagagggcgcagggacttcctttgtcccaaatctgtgcggagccgaaatctgggaggcgccgccgcaccccctctagcgggcgcggggcgaagcggtgcggcgccggcaggaaggaaatgggcggggagggccttcgtgcgtcgccgcgccgccgtccccttctccctctccagcctcggggctgtccgcggggggacggctgccttcgggggggacggggcagggcggggttcggcttctggcgtgtgaccggcggctctagagcctctgctaaccatgttcatgccttcttctttttcctacagctcctgggcaacgtgctggttattgtgctgtctcatcattttggcaaagaattgatttgataccgcgggccctaagaagttcctacgggccctaagaagttcctaagatcggaagagcacacgtctgaactccagtcac

SEQ ID NO: 760 - DNA, 588 bp, synthetic construct
  source 1..588: mol_type = other DNA
cactctttccctacacgacgctcttccgatcttctagactcgagtggatccgttctagactcgagtggatccgccaccatgagtggtcccctagaaggggccgatgggggaggagaccccaggcccggagaacctttttgtcctggaggagtcccatcccctggggccccgcagcaccggccttgtccaggccccagcctggctgatgacactgatgcaaacagcaatggctcaagtggcaatgagtccaacggacccgagtccaggggcgcatctcagcggagttctcatagttcctcttctggcaatggcaaggactcagctctgctggagaccactgagagcagcaagagtacaaactcacagagcccatccccacccagcagctccattgcctacagcctcctgagtgcgagctcagagcaggacaacccatctaccagtggctgcagcagtgaacagtcagctcgagccaggacccagaaagaactcatgactgcacttcgggagctcaaacttcgactgccaccagagccttcgactgccaccagagcagatcggaagagcacacgtctgaactccagtcac

SEQ ID NO: 761 - DNA, 608 bp, synthetic construct
  source 1..608: mol_type = other DNA
cactctttccctacacgacgctcttccgatcttcgggtctcagatggagccttcgggtctcagatggagcccctgcacagccgtgctgcctactcattgccgagcgcatccactctggttatgaagctccccggatccctcctgacaagaggatcttcaccacccgacacacaccaagctgcctcttccaggatgtagatgaaagggctgccccactgctgggttaccttccccaggatctcctgggggctccagtacttctctttctacatcctgaggaccgacccctcatgctggccattcataagaagatactgcagctggcaggccagccctttgaccattcccctattcgcttctgtgctcggaacggggaatatgtcaccatggacaccagctgggccggttttgtgcacccctggagccgcaaggtggctttcgtgttgggtcgccataaagtgcgcacggcacccctgaatgaggacgtcttcactcccccagcccccagcccagctccgtccctggactctgatatccaggagctctcagagcagaccaggagctctcagagcagagatcggaagagcacacgtctgaactccagtcac

SEQ ID NO: 762 - DNA, 605 bp, synthetic construct
  source 1..605: mol_type = other DNA
cactctttccctacacgacgctcttccgatctcaggtccagttcctgtgggcaggtccagttcctgtgggggccaagaaagatccgtcgtcagcaatgctgtctggggagggggcaactcctcggaaggagccagtggtgggaggcaccctgagcccgctcgccctggccaataaggcagagagcgtggtgtccgtcaccagtcagtgtagcttcagctccaccatcgtccatgtgggagacaagaagcccccggagtcggacatcatcatgatggaagacctgcctggcctggcccctggcccagcccccagtccggcccccagccccacagtagcccctgacccaaccccagatgcttatcgcccagtgggtctgaccaaggccgtgctgtccctgcacacacagaaggaagagcaagccttcctcaaccgcttcagagatcttggcaggcttcgtggacttgacacctcttctgtggccccctcagcccctggctgccaccatggccccattccccctggtcgccgacaccactgccgatctaaagcacaccactgccgatctaaagcagatcggaagagcacacgtctgaactccagtcac

SEQ ID NO: 763 - DNA, 614 bp, synthetic construct
  source 1..614: mol_type = other DNA
cactctttccctacacgacgctcttccgatcttgctgagccagaggccagatgctgagccagaggccagattggtggaggttactgagtcgtccaatcaggatgcactttcaggctccagcgacctgctggagctactgctccaagaagactctcgctcgggcacaggctccgcagcctcaggctccctgggctctggcctgggctctgggtctggttcaggatcccacgaagggggaagcacctcagccagcatcacccgcagcagtcagagcagccatacaagcaagtactttggcagcatcgactcttccgaggctgaagctggggctgctcgggccaggactgagcctggggaccaggtcattaagtgtgtgctccaggaccccatctggctgctcatggccaatgccgaccagcgtgtcatgatgacataccaggtgccgtccagggatgcagcctctgtgctgaagcaagaccgggagaggctccgggccatgcagaaacagcagccacggttctcagaggaccagaggcgggaactgggtgctgtgcactcctggggtgctgtgcactcctggagatcggaagagcacacgtctgaactccagtcac

SEQ ID NO: 764 - DNA, 608 bp, synthetic construct
  source 1..608: mol_type = other DNA
cactctttccctacacgacgctcttccgatcttgccttctagttgccagcctgccttctagttgccagccatctgttgtttgcccctcccccgtgccttccttgaccctggaaggtgccactcccactgtcctttcctaataaaatgaggaaattgcatcgcattgtctgagtaggtgtcattctattctggggggtggggtggggcaggacagcaagggggaggattgggaagacaatagcaggcatgctggggatgcggtgggctctataattcacagtgtcgcgagttagactatgtaagcagaattttaatcatttttaaagagcccagtacttcatatccatttctcccgctccttctgcagccttatcaaaaggtattttagaacactcattttagccccattttcatttattatactggcttatccaacccctagacagagcattggcattttccctttcctgatcttagaagtctgatgactcatgaaaccagacagattagttacatacaccacaaatcgaggctgtagctggggcctcaacactgtagctggggcctcaacactagatcggaagagcacacgtctgaactccagtcac

SEQ ID NO: 765 - DNA, 602 bp, synthetic construct
  source 1..602: mol_type = other DNA
cactctttccctacacgacgctcttccgatctgagggctcagttgggctggagggctcagttgggctgttttggaggcaggaagcacttgctctcccaaagtcgctctgagttgttatcagtaagggagctgcagtggagtaggcggggagaaggccgcacccttctccggaggggggaggggagtgttgcaatacctttctgggagttctctgctgcctcctggcttctgaggaccgccctgggcctgggagaatcccttccccctcttccctcgtgatctgcaactccagtctttctagttaattaaccgtttaaacaattctgcaggaatctagttattaatagtaatcaattacggggtcattagttcatagcccatatatggagttccgcgttacataacttacggtaaatggcccgcctggctgaccgcccaacgacccccgcccattgacgtcaataatgacgtatgttcccatagtaacgccaatagggactttccattgacgtcaatgggtggagtatttacggtaaactgcccacttggcggtaaactgcccacttggagatcggaagagcacacgtctgaactccagtcac

SEQ ID NO: 766 - DNA, 620 bp, synthetic construct
  source 1..620: mol_type = other DNA
cactctttccctacacgacgctcttccgatcttccgggctgtaattagcgctccgggctgtaattagcgcttggtttaatgacggcttgtttcttttctgtggctgcgtgaaagccttgaggggctccgggagggccctttgtgcggggggagcggctcggggggtgcgtgcgtgtgtgtgtgcgtggggagcgccgcgtgcggctccgcgctgcccggcggctgtgagcgctgcgggcgcggcgcggggctttgtgcgctccgcagtgtgcgcgaggggagcgcggccgggggcggtgccccgcggtgcggggggggctgcgaggggaacaaaggctgcgtgcggggtgtgtgcgtgggggggtgagcagggggtgtgggcgcgtcggtcgggctgcaaccccccctgcacccccctccccgagttgctgagcacggcccggcttcgggtgcggggctccgtacggggcgtggcgcggggctcgccgtgccgggcggggggtggcggcaggtgggggtgccgggcggggcggggccgcctcgggccggggagggctcgggggagggggagggctcgggggaggggagatcggaagagcacacgtctgaactccagtcac

SEQ ID NO: 767 - DNA, 567 bp, synthetic construct
  source 1..567: mol_type = other DNA
cactctttccctacacgacgctcttccgatctgcaatgagtccaacggaccgcaatgagtccaacggacccgagtccaggggcgcatctcagcggagttctcatagttcctcttctggcaatggcaaggactcagctctgctggagaccactgagagcagcaagagtacaaactcacagagcccatccccacccagcagctccattgcctacagcctcctgagtgcgagctcagagcaggacaacccatctaccagtggctgcagcagtgaacagtcagctcgagccaggacccagaaagaactcatgactgcacttcgggagctcaaacttcgactgccaccagagcgtcggggcaagggccgctctgggaccttggccacactgcagtacgctctggcctgtgtcaagcaggttcaggctaaccaggaatattaccagcagtggagtctggaggagggtgagccttgtgccatggacatgtctacttacaccctggaggaattggagcataccctggaggaattggagcatagatcggaagagcacacgtctgaactccagtcac

SEQ ID NO: 768 - DNA, 597 bp, synthetic construct
  source 1..597: mol_type = other DNA
cactctttccctacacgacgctcttccgatctctgtgcacagctccagccctgtgcacagctccagccccacggggctctgtggagttggccctctgatgtcccctggtcctctacacagccctggctcctccagtgatagcaatgggggggacgctgaggggcctgggcctcctgctccagtgactttccagcagatctgtaaggatgtgcatctggtaaagcaccagggacaacagctcttcattgaatctcgggccaagcccccaccccggccccgcctccttgctacaggtacattcaaagccaaagtccttccctgccagtccccaaaccccgaactggaggtggccccagttcctgaccaagcctcgttagccttggcccctgaggagccagagaggaaagaaacctctggctgttcctaccagcagatcaactgcctggacagcatcctcaggtatttggagagctgcaacattcccagtacaaccaagcgtaaatgtgcctcctcctcctcctacactgcctcttcagcctctgacactgcctcttcagcctctgagatcggaagagcacacgtctgaactccagtcac

SEQ ID NO: 769 - DNA, 601 bp, synthetic construct
  source 1..601: mol_type = other DNA
cactctttccctacacgacgctcttccgatctaccatcgtccatgtgggagaccatcgtccatgtgggagacaagaagcccccggagtcggacatcatcatgatggaagacctgcctggcctggcccctggcccagcccccagtccggcccccagccccacagtagcccctgacccaaccccagatgcttatcgcccagtgggtctgaccaaggccgtgctgtccctgcacacacagaaggaagagcaagccttcctcaaccgcttcagagatcttggcaggcttcgtggacttgacacctcttctgtggccccctcagcccctggctgccaccatggccccattccccctggtcgccgacaccactgccgatctaaagcaaagcgttcccgccaccaccaccaccagaccccccggcccgaaactccctgctatgtctcccatccttcacctgtgccctcttctggaccctggccacccccaccagccacgacccccttcccagcaatggtccagccctacccactcccagtattctcccctcgagcccagtattctcccctcgagagatcggaagagcacacgtctgaactccagtcac

SEQ ID NO: 770 - DNA, 576 bp, synthetic construct
  source 1..576: mol_type = other DNA
cactctttccctacacgacgctcttccgatctccgcagcagtcagagcagcccgcagcagtcagagcagccatacaagcaagtactttggcagcatcgactcttccgaggctgaagctggggctgctcgggccaggactgagcctggggaccaggtcattaagtgtgtgctccaggaccccatctggctgctcatggccaatgccgaccagcgtgtcatgatgacataccaggtgccgtccagggatgcagcctctgtgctgaagcaagaccgggagaggctccgggccatgcagaaacagcagccacggttctcagaggaccagaggcgggaactgggtgctgtgcactcctgggtccggaagggccagctgcctcgggcccttgatgtgacggcgtgtgtggactgtggcagcagcgttcaagatcctggccactctgatgaccccctcttctcagaactggatggattggggctggagcccatggaagagggtggaggcgagggtggtgggtgtggtgtgagggtggtgggtgtggtgtagatcggaagagcacacgtctgaactccagtcac

SEQ ID NO: 771 - DNA, 612 bp, synthetic construct
  source 1..612: mol_type = other DNA
cactctttccctacacgacgctcttccgatcttgttgatcctttgccttgatccttgttgatcctttgccttgatccttaattttcagtgtctatcacctctcccgtcaggtggtgttccacatttgggcctattctcagtccagggagttttacaacaatagatgtattgagaatccaacctaaagcttaactttccactcccatgaatgcctctctcctttttctccatttataaactgagctattaaccattaatggtttccaggtggatgtctcctcccccaatattacctgatgtatcttacatattgccaggctgatattttaagacattaaaaggtatatttcattattgagccacatggtattgattactgcttactaaaattttgtcattgtacacatctgtaaaaggtggttccttttggaatgcaaagttcaggtgtttgttgtctttcctgacctaaggtcttgtgagcttgtattttttctatttaagcagtgctttctcttggactggcttgactcatggcattctacacgttattgctggggcattctacacgttattgctggagatcggaagagcacacgtctgaactccagtcac

SEQ ID NO: 772 - DNA, 1237 bp, synthetic construct
  source 1..1237: mol_type = other DNA
cactctttccctacacgacgctcttccgatctgtaggtggggtgaggcgaggtaggtggggtgaggcgagctggacgtgcgggcgcggtcggcctctggcggggcgggggaggggagggagggtcagcgaaagtagctcgcgcgcgagcggccgcccaccctccccttcctctgggggagtcgttttacccgccgccggccgggcctcgtcgtctgattggctctcggggcccagaaaactggcccttgccattggctcgtgttcgtgcaagttgagtccatccgccggccagcgggggcggcgaggaggcgctcccaggttccggccctcccctcggccccgcgccgcagagtctggccgcgcgcccctgcgcaacgtggcaggaagcgcgcgctgggggcggggacgggcagtagggctgagcggctgcggggcgggtgcaagcacgtttccgacttgagttgcctcaagaggggcgtgctgagccagacctccatcgcgcactccggggagtggagggaaggagcgagggctcagttgggctgttttggaggcaggaagcacttgctctcccaaagtcgctctgagttgttatcagtaagggagctgcagtggagtaggcggggagaaggccgcacccttctccggaggggggaggggagtgttgcaatacctttctgggagttctctgctgcctcctggcttctgaggaccgccctgggcctgggagaatcccttccccctcttccctcgtgatctgcaactccagtctttctagttaattaaccgtttaaacaattctgcaggaatctagttattaatagtaatcaattacggggtcattagttcatagcccatatatggagttccgcgttacataacttacggtaaatggcccgcctggctgaccgcccaacgacccccgcccattgacgtcaataatgacgtatgttcccatagtaacgccaatagggactttccattgacgtcaatgggtggagtatttacggtaaactgcccacttggcagtacatcaagtgtatcatatgccaagtacgccccctattgacgtcaatgacggtaaatggcccgcctggcattatgcccagtacatgaccttatgggactttcctacttggcagtacatctacgtattagtcatcgctattaccatggtcgaggcgctattaccatggtcgaggagatcggaagagcacacgtctgaactccagtcac

SEQ ID NO: 773 - DNA, 1243 bp, synthetic construct
  source 1..1243: mol_type = other DNA
cactctttccctacacgacgctcttccgatcttctagactcgagtggatccgttctagactcgagtggatccgccaccatgagtggtcccctagaaggggccgatgggggaggagaccccaggcccggagaacctttttgtcctggaggagtcccatcccctggggccccgcagcaccggccttgtccaggccccagcctggctgatgacactgatgcaaacagcaatggctcaagtggcaatgagtccaacggacccgagtccaggggcgcatctcagcggagttctcatagttcctcttctggcaatggcaaggactcagctctgctggagaccactgagagcagcaagagtacaaactcacagagcccatccccacccagcagctccattgcctacagcctcctgagtgcgagctcagagcaggacaacccatctaccagtggctgcagcagtgaacagtcagctcgagccaggacccagaaagaactcatgactgcacttcgggagctcaaacttcgactgccaccagagcgtcggggcaagggccgctctgggaccttggccacactgcagtacgctctggcctgtgtcaagcaggttcaggctaaccaggaatattaccagcagtggagtctggaggagggtgagccttgtgccatggacatgtctacttacaccctggaggaattggagcatatcacatccgaatacacacttcgaaaccaggacaccttctctgtggctgtgtccttcctgacaggccggattgtctatatttcggagcaggcaggtgtcctgctgcgttgcaaacgggatgtgtttcggggtgcccgcttctcagagctcctggctccccaggatgtgggtgtcttctatggctctactacaccatctcgactgcccacctggggcactggcacctctgcaggttcaggtctcaaggacttcacccaggaaaagtctgtcttctgccgaatcagaggaggtcctgaccgggatccagggcctcggtaccagccattccgcctaaccccatatgtgaccaagattcgggtctcagatggagcccctgcacagccgtgctgcctactcattgccgagcgcatccactctggttatgaagctccccggatccctcctgacaagaggatcttcaccacccgacacacaccaagctgcctcttccacaccaagctgcctcttccaagatcggaagagcacacgtctgaactccagtcac

SEQ ID NO: 774 - DNA, 1267 bp, synthetic construct
  source 1..1267: mol_type = other DNA
cactctttccctacacgacgctcttccgatctccgcaaggtggctttcgtgccgcaaggtggctttcgtgttgggtcgccataaagtgcgcacggcacccctgaatgaggacgtcttcactcccccagcccccagcccagctccgtccctggactctgatatccaggagctctcagagcagatccatcgattgctgctgcagcctgtgcacagctccagccccacggggctctgtggagttggccctctgatgtcccctggtcctctacacagccctggctcctccagtgatagcaatgggggggacgctgaggggcctgggcctcctgctccagtgactttccagcagatctgtaaggatgtgcatctggtaaagcaccagggacaacagctcttcattgaatctcgggccaagcccccaccccggccccgcctccttgctacaggtacattcaaagccaaagtccttccctgccagtccccaaaccccgaactggaggtggccccagttcctgaccaagcctcgttagccttggcccctgaggagccagagaggaaagaaacctctggctgttcctaccagcagatcaactgcctggacagcatcctcaggtatttggagagctgcaacattcccagtacaaccaagcgtaaatgtgcctcctcctcctcctacactgcctcttcagcctctgatgatgacaagcagagggcaggtccagttcctgtgggggccaagaaagatccgtcgtcagcaatgctgtctggggagggggcaactcctcggaaggagccagtggtgggaggcaccctgagcccgctcgccctggccaataaggcagagagcgtggtgtccgtcaccagtcagtgtagcttcagctccaccatcgtccatgtgggagacaagaagcccccggagtcggacatcatcatgatggaagacctgcctggcctggcccctggcccagcccccagtccggcccccagccccacagtagcccctgacccaaccccagatgcttatcgcccagtgggtctgaccaaggccgtgctgtccctgcacacacagaaggaagagcaagccttcctcaaccgcttcagagatcttggcaggcttcgtggacttgacacctcttctgtggccccctcagcccctggctgccaccatggccccattccccctggtcgccgacaccactgccgatctaaagcacaccactgccgatctaaagcagatcggaagagcacacgtctgaactccagtcac

SEQ ID NO: 775 - DNA, 1330 bp, synthetic construct
  source 1..1330: mol_type = other DNA
cactctttccctacacgacgctcttccgatcttctgcttcactctccccatcttctgcttcactctccccatctcccccccctccccacccccaattttgtatttatttattttttaattattttgtgcagcgatgggggcggggggggggggggggcgcgcgccaggcggggcggggcggggcgaggggcggggcggggcgaggcggagaggtgcggcggcagccaatcagagcggcgcgctccgaaagtttccttttatggcgaggcggcggcggcggcggccctataaaaagcgaagcgcgcggcgggcggggagtcgctgcgacgctgccttcgccccgtgccccgctccgccgccgcctcgcgccgcccgccccggctctgactgaccgcgttactcccacaggtgagcgggcgggacggcccttctcctccgggctgtaattagcgcttggtttaatgacggcttgtttcttttctgtggctgcgtgaaagccttgaggggctccgggagggccctttgtgcggggggagcggctcggggggtgcgtgcgtgtgtgtgtgcgtggggagcgccgcgtgcggctccgcgctgcccggcggctgtgagcgctgcgggcgcggcgcggggctttgtgcgctccgcagtgtgcgcgaggggagcgcggccgggggcggtgccccgcggtgcggggggggctgcgaggggaacaaaggctgcgtgcggggtgtgtgcgtgggggggtgagcagggggtgtgggcgcgtcggtcgggctgcaaccccccctgcacccccctccccgagttgctgagcacggcccggcttcgggtgcggggctccgtacggggcgtggcgcggggctcgccgtgccgggcggggggtggcggcaggtgggggtgccgggcggggcggggccgcctcgggccggggagggctcgggggaggggcgcggcggcccccggagcgccggcggctgtcgaggcgcggcgagccgcagccattgccttttatggtaatcgtgcgagagggcgcagggacttcctttgtcccaaatctgtgcggagccgaaatctgggaggcgccgccgcaccccctctagcgggcgcggggcgaagcggtgcggcgccggcaggaaggaaatgggcggggagggccttcgtgcgtcgccgcgccgccgtccccttctccctctccagcctcggggctgtccgcggggggacggctgccttcgggggggacggggcagggcggggttcggcttctggcgtgtgaggttcggcttctggcgtgtgagatcggaagagcacacgtctgaactccagtcac

SEQ ID NO: 776 - DNA, 1288 bp, synthetic construct
  source 1..1288: mol_type = other DNA
cactctttccctacacgacgctcttccgatctgcccgaaactccctgctatggcccgaaactccctgctatgtctcccatccttcacctgtgccctcttctggaccctggccacccccaccagccacgacccccttcccagcaatggtccagccctacccactcccagtattctcccctcgaggaggaccccagccccttccccctgcccctacatctgtgtcccctgctaccttcccttctcccttagtgaccccaatggtggccttggtgctccctaactatctattccctaccccacctagttatccatatggggtgtcccaggcccctgttgaggggccacccacgcctgcttcccactcgccctctccatccctgcccccaccacctctcagccccccccaccgcccagactccccactgttcaactcgagatgcagctccccactccagctcaatctgctgcagcttgaggagtccccccgcacggaggggggcgctgctgcaggaggcccaggaagcagtgctgggcccctgcctcccagtgaggagactgctgagccagaggccagattggtggaggttactgagtcgtccaatcaggatgcactttcaggctccagcgacctgctggagctactgctccaagaagactctcgctcgggcacaggctccgcagcctcaggctccctgggctctggcctgggctctgggtctggttcaggatcccacgaagggggaagcacctcagccagcatcacccgcagcagtcagagcagccatacaagcaagtactttggcagcatcgactcttccgaggctgaagctggggctgctcgggccaggactgagcctggggaccaggtcattaagtgtgtgctccaggaccccatctggctgctcatggccaatgccgaccagcgtgtcatgatgacataccaggtgccgtccagggatgcagcctctgtgctgaagcaagaccgggagaggctccgggccatgcagaaacagcagccacggttctcagaggaccagaggcgggaactgggtgctgtgcactcctgggtccggaagggccagctgcctcgggcccttgatgtgacggcgtgtgtggactgtggcagcagcgttcaagatcctggccactctgatgaccccctcttctcagaactggatggattggggctggagcccatggaagagggtggaggcgagggtggtgggtgtggtgtgagggtggtgggtgtggtgtagatcggaagagcacacgtctgaactccagtcac

SEQ ID NO: 777 - DNA, 981 bp, synthetic construct
  source 1..981: mol_type = other DNA
cactctttccctacacgacgctcttccgatctcaagggggaggattgggaagcaagggggaggattgggaagacaatagcaggcatgctggggatgcggtgggctctataattcacagtgtcgcgagttagactatgtaagcagaattttaatcatttttaaagagcccagtacttcatatccatttctcccgctccttctgcagccttatcaaaaggtattttagaacactcattttagccccattttcatttattatactggcttatccaacccctagacagagcattggcattttccctttcctgatcttagaagtctgatgactcatgaaaccagacagattagttacatacaccacaaatcgaggctgtagctggggcctcaacactgcagttcttttataactccttagtacactttttgttgatcctttgccttgatccttaattttcagtgtctatcacctctcccgtcaggtggtgttccacatttgggcctattctcagtccagggagttttacaacaatagatgtattgagaatccaacctaaagcttaactttccactcccatgaatgcctctctcctttttctccatttataaactgagctattaaccattaatggtttccaggtggatgtctcctcccccaatattacctgatgtatcttacatattgccaggctgatattttaagacattaaaaggtatatttcattattgagccacatggtattgattactgcttactaaaattttgtcattgtacacatctgtaaaaggtggttccttttggaatgcaaagttcaggtgtttgttgtctttcctgacctaaggtcttgtgagcttgtattttttctatttaagcagtgctttctcttggactggcttgactcatggcattctacacgttattgctggggcattctacacgttattgctggagatcggaagagcacacgtctgaactccagtcac

SEQ ID NO: 778 - DNA, 228 bp, synthetic construct; identical to SEQ ID NO: 712
  source 1..228: mol_type = other DNA

SEQ ID NO: 779 - DNA, 235 bp, synthetic construct; identical to SEQ ID NO: 724
  source 1..235: mol_type = other DNA

SEQ ID NO: 780 - DNA, 253 bp, synthetic construct; identical to SEQ ID NO: 736
  source 1..253: mol_type = other DNA

SEQ ID NO: 781 - DNA, 237 bp, synthetic construct; identical to SEQ ID NO: 748
  source 1..237: mol_type = other DNA

SEQ ID NO: 782 - DNA, 260 bp, synthetic construct; identical to SEQ ID NO: 714
  source 1..260: mol_type = other DNA

SEQ ID NO: 783 - DNA, 244 bp, synthetic construct; identical to SEQ ID NO: 726
  source 1..244: mol_type = other DNA

SEQ ID NO: 784 - DNA, 236 bp, synthetic construct; identical to SEQ ID NO: 738
  source 1..236: mol_type = other DNA

SEQ ID NO: 785 - DNA, 240 bp, synthetic construct; identical to SEQ ID NO: 750
  source 1..240: mol_type = other DNA

SEQ ID NO: 786 - DNA, 281 bp, synthetic construct; identical to SEQ ID NO: 716
  source 1..281: mol_type = other DNA

SEQ ID NO: 787 - DNA, 255 bp, synthetic construct; identical to SEQ ID NO: 728
  source 1..255: mol_type = other DNA

SEQ ID NO: 788 - DNA, 254 bp, synthetic construct; identical to SEQ ID NO: 740
  source 1..254: mol_type = other DNA

SEQ ID NO: 789 - DNA, 197 bp, synthetic construct; identical to SEQ ID NO: 752
  source 1..197: mol_type = other DNA

SEQ ID NO: 790 - DNA, 221 bp, synthetic construct; identical to SEQ ID NO: 718
  source 1..221: mol_type = other DNA

SEQ ID NO: 791 - DNA, 234 bp, synthetic construct; identical to SEQ ID NO: 730
  source 1..234: mol_type = other DNA

SEQ ID NO: 792 - DNA, 253 bp, synthetic construct; identical to SEQ ID NO: 742
  source 1..253: mol_type = other DNA

SEQ ID NO: 793 - DNA, 265 bp, synthetic construct; identical to SEQ ID NO: 720
  source 1..265: mol_type = other DNA

SEQ ID NO: 794 - DNA, 241 bp, synthetic construct; identical to SEQ ID NO: 732
  source 1..241: mol_type = other DNA

SEQ ID NO: 795 - DNA, 219 bp, synthetic construct; identical to SEQ ID NO: 744
  source 1..219: mol_type = other DNA

SEQ ID NO: 796 - DNA, 228 bp, synthetic construct; identical to SEQ ID NO: 722
  source 1..228: mol_type = other DNA

SEQ ID NO: 797 - DNA, 223 bp, synthetic construct; identical to SEQ ID NO: 734
  source 1..223: mol_type = other DNA

SEQ ID NO: 798 - DNA, 238 bp, synthetic construct; identical to SEQ ID NO: 746
  source 1..238: mol_type = other DNA

SEQ ID NO: 799 - DNA, 259 bp, synthetic construct; identical to SEQ ID NO: 753
  source 1..259: mol_type = other DNA

SEQ ID NO: 800 - DNA, 245 bp, synthetic construct; identical to SEQ ID NO: 755
  source 1..245: mol_type = other DNA

SEQ ID NO: 801 - DNA, 228 bp, synthetic construct; identical to SEQ ID NO: 712
  source 1..228: mol_type = other DNA

SEQ ID NO: 802 - DNA, 245 bp, synthetic construct; identical to SEQ ID NO: 715
  source 1..245: mol_type = other DNA

SEQ ID NO: 803 - DNA, 221 bp, synthetic construct; identical to SEQ ID NO: 718
  source 1..221: mol_type = other DNA

SEQ ID NO: 804 - DNA, 265 bp, synthetic construct; identical to SEQ ID NO: 720
  source 1..265: mol_type = other DNA

SEQ ID NO: 805 - DNA, 243 bp, synthetic construct; identical to SEQ ID NO: 723
  source 1..243: mol_type = other DNA

SEQ ID NO: 806 - DNA, 244 bp, synthetic construct; identical to SEQ ID NO: 726
  source 1..244: mol_type = other DNA

SEQ ID NO: 807 - DNA, 277 bp, synthetic construct; identical to SEQ ID NO: 729
  source 1..277: mol_type = other DNA

SEQ ID NO: 808 - DNA, 241 bp, synthetic construct; identical to SEQ ID NO: 732
  source 1..241: mol_type = other DNA

SEQ ID NO: 809 - DNA, 246 bp, synthetic construct; identical to SEQ ID NO: 735
  source 1..246: mol_type = other DNA

SEQ ID NO: 810 - DNA, 236 bp, synthetic construct; identical to SEQ ID NO: 738
  source 1..236: mol_type = other DNA

SEQ ID NO: 811 - DNA, 244 bp, synthetic construct; identical to SEQ ID NO: 741
  source 1..244: mol_type = other DNA

SEQ ID NO: 812 - DNA, 219 bp, synthetic construct; identical to SEQ ID NO: 744
  source 1..219: mol_type = other DNA

SEQ ID NO: 813 - DNA, 228 bp, synthetic construct; identical to SEQ ID NO: 747
  source 1..228: mol_type = other DNA

SEQ ID NO: 814 - DNA, 240 bp, synthetic construct; identical to SEQ ID NO: 750
  source 1..240: mol_type = other DNA

SEQ ID NO: 815 - DNA, 259 bp, synthetic construct; identical to SEQ ID NO: 753
  source 1..259: mol_type = other DNA

SEQ ID NO: 816 - DNA, 230 bp, synthetic construct; identical to SEQ ID NO: 756
  source 1..230: mol_type = other DNA

SEQ ID NO: 817 - DNA, 50 bp, synthetic construct
  source 1..50: mol_type = other DNA
cactctttccctacacgacgctcttccgatcttcagtcctcttggcccac

SEQ ID NO: 818 - DNA, 53 bp, synthetic construct
  source 1..53: mol_type = other DNA
gtgactggagttcagacgtgtgctcttccgatctaccttctccgggatactgc

SEQ ID NO: 819 - DNA, 51 bp, synthetic construct
  source 1..51: mol_type = other DNA
cactctttccctacacgacgctcttccgatctggccaacgagaagggaagc

SEQ ID NO: 820 - DNA, 54 bp, synthetic construct
  source 1..54: mol_type = other DNA
gtgactggagttcagacgtgtgctcttccgatcttcccagttccaaacctctgg

SEQ ID NO: 821 - DNA, 51 bp, synthetic construct
  source 1..51: mol_type = other DNA
cactctttccctacacgacgctcttccgatcttccagaacccagaacctgc

SEQ ID NO: 822 - DNA, 53 bp, synthetic construct
  source 1..53: mol_type = other DNA
gtgactggagttcagacgtgtgctcttccgatctttgtctggttgctccaggc

SEQ ID NO: 823 - DNA, 51 bp, synthetic construct
  source 1..51: mol_type = other DNA
cactctttccctacacgacgctcttccgatctagttcaggtgagtggtgcc

SEQ ID NO: 824 - DNA, 53 bp, synthetic construct
  source 1..53: mol_type = other DNA
gtgactggagttcagacgtgtgctcttccgatcttgtctgctttggtgacccg

SEQ ID NO: 825 - DNA, 47 bp, synthetic construct
  source 1..47: mol_type = other DNA
ggcatttcagtcaggtgcccaatgtacccctcaaagaccttggccac

SEQ ID NO: 826 - DNA, 48 bp, synthetic construct
  source 1..48: mol_type = other DNA
gttccgggtaggcagttcgctccaagctgtccttccagaggatgggac

SEQ ID NO: 827 - DNA, 48 bp, synthetic construct
  source 1..48: mol_type = other DNA
ggcatttcagtcaggtgcccaatgtaccacaactggttacatcccacc

SEQ ID NO: 828 - DNA, 46 bp, synthetic construct
  source 1..46: mol_type = other DNA
gttccgggtaggcagttcgctccaagctaagcaggactgcccttcc

SEQ ID NO: 829 - DNA, 46 bp, synthetic construct
  source 1..46: mol_type = other DNA
ggcatttcagtcaggtgcccaatgtacccctcttcccaggtgctcc

SEQ ID NO: 830 - DNA, 46 bp, synthetic construct
  source 1..46: mol_type = other DNA
gttccgggtaggcagttcgctccaagcttgggcctcagatctctgc

SEQ ID NO: 831 - DNA, 48 bp, synthetic construct
  source 1..48: mol_type = other DNA
ggcatttcagtcaggtgcccaatgtacccctgatggacatgttcaggg

SEQ ID NO: 832 - DNA, 47 bp, synthetic construct
  source 1..47: mol_type = other DNA
gttccgggtaggcagttcgctccaagctatcctcaggttcagcaggg

SEQ ID NO: 833 - DNA, 47 bp, synthetic construct
  source 1..47: mol_type = other DNA
ggcatttcagtcaggtgcccaatgtaccctggctgtgaagaccatcc

SEQ ID NO: 834 - DNA, 48 bp, synthetic construct
  source 1..48: mol_type = other DNA
gttccgggtaggcagttcgctccaagctttctcctcatcaccagggac

SEQ ID NO: 835 - DNA, 48 bp, synthetic construct
  source 1..48: mol_type = other DNA
ggcatttcagtcaggtgcccaatgtaccccaagtcagatccctgatgg

SEQ ID NO: 836 - DNA, 47 bp, synthetic construct
  source 1..47: mol_type = other DNA
gttccgggtaggcagttcgctccaagctggtgcgggagatgtccttc

SEQ ID NO: 837 - DNA, 47 bp, synthetic construct
  source 1..47: mol_type = other DNA
ggcatttcagtcaggtgcccaatgtaccgtccacagctggtgtggag

SEQ ID NO: 838 - DNA, 47 bp, synthetic construct
  source 1..47: mol_type = other DNA
gttccgggtaggcagttcgctccaagctaccattctttctgacccgg

SEQ ID NO: 839 - DNA, 47 bp, synthetic construct
  source 1..47: mol_type = other DNA
ggcatttcagtcaggtgcccaatgtaccccgcctgatctatggtgcc

SEQ ID NO: 840 - DNA, 47 bp, synthetic construct
  source 1..47: mol_type = other DNA
gttccgggtaggcagttcgctccaagctacattggtccagccaccag

SEQ ID NO: 841 - DNA, 47 bp, synthetic construct
  source 1..47: mol_type = other DNA
ggcatttcagtcaggtgcccaatgtaccacctggactctgagactgg

SEQ ID NO: 842 - DNA, 47 bp, synthetic construct
  source 1..47: mol_type = other DNA
gttccgggtaggcagttcgctccaagctagcaccagaagcaagtgcc

SEQ ID NO: 843 - DNA, 48 bp, synthetic construct
  source 1..48: mol_type = other DNA
ggcatttcagtcaggtgcccaatgtaccgtggaactgacctgtacagc

SEQ ID NO: 844 - DNA, 48 bp, synthetic construct
  source 1..48: mol_type = other DNA
gttccgggtaggcagttcgctccaagctgcttcttcttgagtcagcgc

SEQ ID NO: 845 - DNA, 48 bp, synthetic construct
  source 1..48: mol_type = other DNA
ggcatttcagtcaggtgcccaatgtacctctgtgaagtggaggaccag

SEQ ID NO: 846 - DNA, 47 bp, synthetic construct
  source 1..47: mol_type = other DNA
gttccgggtaggcagttcgctccaagctgcactgaggggctactacc

SEQ ID NO: 847 - DNA, 47 bp, synthetic construct
  source 1..47: mol_type = other DNA
ggcatttcagtcaggtgcccaatgtaccgtgtctcagctggagctcc

SEQ ID NO: 848 - DNA, 47 bp, synthetic construct
  source 1..47: mol_type = other DNA
gttccgggtaggcagttcgctccaagcttatgctggaggccttctgg

SEQ ID NO: 849 - DNA, 47 bp, synthetic construct
  source 1..47: mol_type = other DNA
ggcatttcagtcaggtgcccaatgtaccggagagggcttcctcctcc

SEQ ID NO: 850 - DNA, 47 bp, synthetic construct
  source 1..47: mol_type = other DNA
gttccgggtaggcagttcgctccaagctagagccagcatactgaggc

SEQ ID NO: 851 - DNA, 47 bp, synthetic construct
  source 1..47: mol_type = other DNA
ggcatttcagtcaggtgcccaatgtaccgagagccactcagctccag

SEQ ID NO: 852 - DNA, 48 bp, synthetic construct
  source 1..48: mol_type = other DNA
gttccgggtaggcagttcgctccaagctgcttcgagacctttgcctcc

SEQ ID NO: 853 - DNA, 47 bp, synthetic construct
  source 1..47: mol_type = other DNA
ggcatttcagtcaggtgcccaatgtaccttctgcccacatggtccac

SEQ ID NO: 854 - DNA, 47 bp, synthetic construct
  source 1..47: mol_type = other DNA
gttccgggtaggcagttcgctccaagctccacagttcactgatgccc

SEQ ID NO: 855 - DNA, 48 bp, synthetic construct
  source 1..48: mol_type = other DNA
ggcatttcagtcaggtgcccaatgtacctagatcagagaaccctgggg

SEQ ID NO: 856 - DNA, 48 bp, synthetic construct
  source 1..48: mol_type = other DNA
gttccgggtaggcagttcgctccaagctatgctggattcagctcttcc

SEQ ID NO: 857 - DNA, 48 bp, synthetic construct
  source 1..48: mol_type = other DNA
ggcatttcagtcaggtgcccaatgtaccttattccagactcacaccgg

SEQ ID NO: 858 - DNA, 48 bp, synthetic construct
  source 1..48: mol_type = other DNA
gttccgggtaggcagttcgctccaagcttaggaagcggatcaagccag

SEQ ID NO: 859 - DNA, 49 bp, synthetic construct
  source 1..49: mol_type = other DNA
ggcatttcagtcaggtgcccaatgtaccggctcctgagataaccagagc

SEQ ID NO: 860 - DNA, 46 bp, synthetic construct
  source 1..46: mol_type = other DNA
gttccgggtaggcagttcgctccaagctcagccctgtgcagactac

SEQ ID NO: 861 - DNA, 51 bp, synthetic construct
  source 1..51: mol_type = other DNA
cactctttccctacacgacgctcttccgatctgtaggtggggtgaggcgag

SEQ ID NO: 862 - DNA, 51 bp, synthetic construct
  source 1..51: mol_type = other DNA
cactctttccctacacgacgctcttccgatcttgcgcaacgtggcaggaag

SEQ ID NO: 863 - DNA, 50 bp, synthetic construct
  source 1..50: mol_type = other DNA
cactctttccctacacgacgctcttccgatctcttctgaggaccgccctg

SEQ ID NO: 864 - DNA, 51 bp, synthetic construct
  source 1..51: mol_type = other DNA
cactctttccctacacgacgctcttccgatctcatatgccaagtacgcccc

SEQ ID NO: 865 - DNA, 51 bp, synthetic construct
  source 1..51: mol_type = other DNA
cactctttccctacacgacgctcttccgatctgcgcgctccgaaagtttcc

SEQ ID NO: 866 - DNA, 50 bp, synthetic construct
  source 1..50: mol_type = other DNA
cactctttccctacacgacgctcttccgatctggggctttgtgcgctccg

SEQ ID NO: 867 - DNA, 50 bp, synthetic construct
  source 1..50: mol_type = other DNA
cactctttccctacacgacgctcttccgatctgcgccggcggctgtcgag

SEQ ID NO: 868 - DNA, 53 bp, synthetic construct
  source 1..53: mol_type = other DNA
cactctttccctacacgacgctcttccgatctctagagcctctgctaaccatg

SEQ ID NO: 869 - DNA, 52 bp, synthetic construct
  source 1..52: mol_type = other DNA
cactctttccctacacgacgctcttccgatcttctagactcgagtggatccg

SEQ ID NO: 870 - DNA, 50 bp, synthetic construct
  source 1..50: mol_type = other DNA
cactctttccctacacgacgctcttccgatctgtgcgagctcagagcagg

SEQ ID NO: 871 - DNA, 52 bp, synthetic construct
  source 1..52: mol_type = other DNA
cactctttccctacacgacgctcttccgatctccttctctgtggctgtgtcc

SEQ ID NO: 872 - DNA, 51 bp, synthetic construct
  source 1..51: mol_type = other DNA
cactctttccctacacgacgctcttccgatcttcgggtctcagatggagcc

SEQ ID NO: 873 - DNA, 51 bp, synthetic construct
  source 1..51: mol_type = other DNA
cactctttccctacacgacgctcttccgatctccgcaaggtggctttcgtg

SEQ ID NO: 874 - DNA, 52 bp, synthetic construct
  source 1..52: mol_type = other DNA
cactctttccctacacgacgctcttccgatcttcttcattgaatctcgggcc

SEQ ID NO: 875 - DNA, 51 bp, synthetic construct
  source 1..51: mol_type = other DNA
cactctttccctacacgacgctcttccgatctcaggtccagttcctgtggg

SEQ ID NO: 876 - DNA, 51 bp, synthetic construct
  source 1..51: mol_type = other DNA
cactctttccctacacgacgctcttccgatctgctgtccctgcacacacag

SEQ ID NO: 877 - DNA, 51 bp, synthetic construct
  source 1..51: mol_type = other DNA
cactctttccctacacgacgctcttccgatctatctgtgtcccctgctacc

SEQ ID NO: 878 - DNA, 51 bp, synthetic construct
  source 1..51: mol_type = other DNA
cactctttccctacacgacgctcttccgatcttgctgagccagaggccaga

SEQ ID NO: 879 - DNA, 51 bp, synthetic construct
  source 1..51: mol_type = other DNA
cactctttccctacacgacgctcttccgatctcataccaggtgccgtccag

SEQ ID NO: 880 - DNA, 51 bp, synthetic construct
  source 1..51: mol_type = other DNA
cactctttccctacacgacgctcttccgatcttgccttctagttgccagcc

SEQ ID NO: 881 - DNA, 53 bp, synthetic construct
  source 1..53: mol_type = other DNA
cactctttccctacacgacgctcttccgatctactggcttatccaacccctag

SEQ ID NO: 882 - DNA, 53 bp, synthetic construct
  source 1..53: mol_type = other DNA
cactctttccctacacgacgctcttccgatcttttccaggtggatgtctcctc

SEQ ID NO: 883 - DNA, 51 bp, synthetic construct
  source 1..51: mol_type = other DNA
cactctttccctacacgacgctcttccgatctgcctcgtcgtctgattggc

SEQ ID NO: 884 - DNA, 50 bp, synthetic construct
  source 1..50: mol_type = other DNA
cactctttccctacacgacgctcttccgatctgagggctcagttgggctg

SEQ ID NO: 885 - DNA, 52 bp, synthetic construct
  source 1..52: mol_type = other DNA
cactctttccctacacgacgctcttccgatctaacttacggtaaatggcccg

SEQ ID NO: 886 - DNA, 52 bp, synthetic construct
  source 1..52: mol_type = other DNA
cactctttccctacacgacgctcttccgatcttctgcttcactctccccatc

SEQ ID NO: 887 - DNA, 51 bp, synthetic construct
  source 1..51: mol_type = other DNA
cactctttccctacacgacgctcttccgatcttccgggctgtaattagcgc

SEQ ID NO: 888 - DNA, 50 bp, synthetic construct
  source 1..50: mol_type = other DNA
cactctttccctacacgacgctcttccgatctctgcaaccccccctgcac

SEQ ID NO: 889 - DNA, 52 bp, synthetic construct
  source 1..52: mol_type = other DNA
cactctttccctacacgacgctcttccgatctgccggcaggaaggaaatggg

SEQ ID NO: 890 - DNA, 51 bp, synthetic construct
  source 1..51: mol_type = other DNA
cactctttccctacacgacgctcttccgatctgcaatgagtccaacggacc

SEQ ID NO: 891 - DNA, 51 bp, synthetic construct
  source 1..51: mol_type = other DNA
cactctttccctacacgacgctcttccgatcttctgggaccttggccacac

SEQ ID NO: 892 - DNA, 51 bp, synthetic construct
  source 1..51: mol_type = other DNA
cactctttccctacacgacgctcttccgatctaccatctcgactgcccacc

SEQ ID NO: 893 - DNA, 51 bp, synthetic construct
  source 1..51: mol_type = other DNA
cactctttccctacacgacgctcttccgatctactgctgggttaccttccc

SEQ ID NO: 894 - DNA, 50 bp, synthetic construct
  source 1..50: mol_type = other DNA
cactctttccctacacgacgctcttccgatctctgtgcacagctccagcc

SEQ ID NO: 895 - DNA, 52 bp, synthetic construct
  source 1..52: mol_type = other DNA
cactctttccctacacgacgctcttccgatctctctggctgttcctaccagc

SEQ ID NO: 896 - DNA, 51 bp, synthetic construct
  source 1..51: mol_type = other DNA
cactctttccctacacgacgctcttccgatctaccatcgtccatgtgggag

SEQ ID NO: 897 - DNA, 52 bp, synthetic construct
  source 1..52: mol_type = other DNA
cactctttccctacacgacgctcttccgatctgcccgaaactccctgctatg

SEQ ID NO: 898 - DNA, 52 bp, synthetic construct
  source 1..52: mol_type = other DNA
cactctttccctacacgacgctcttccgatcttccccactgttcaactcgag

SEQ ID NO: 899 - DNA, 51 bp, synthetic construct
  source 1..51: mol_type = other DNA
cactctttccctacacgacgctcttccgatctccgcagcagtcagagcagc

SEQ ID NO: 900 - DNA, 51 bp, synthetic construct
  source 1..51: mol_type = other DNA
cactctttccctacacgacgctcttccgatctcccttgatgtgacggcgtg

SEQ ID NO: 901 - DNA, 52 bp, synthetic construct
  source 1..52: mol_type = other DNA
cactctttccctacacgacgctcttccgatctggggctaagggttcaagctc

SEQ ID NO: 902 - DNA, 52 bp, synthetic construct
  source 1..52: mol_type = other DNA
cactctttccctacacgacgctcttccgatctcaagggggaggattgggaag

SEQ ID NO: 903 - DNA, 54 bp, synthetic construct
  source 1..54: mol_type = other DNA
cactctttccctacacgacgctcttccgatcttgttgatcctttgccttgatcc

SEQ ID NO: 904 - DNA, 56 bp, synthetic construct
  source 1..56: mol_type = other DNA
cactctttccctacacgacgctcttccgatctcttttggaatgcaaagttcaggtg

SEQ ID NO: 905 - DNA, 52 bp, synthetic construct
  source 1..52: mol_type = other DNA
cactctttccctacacgacgctcttccgatcttgccaagcttcttcaggacc

SEQ ID NO: 906 - DNA, 52 bp, synthetic construct
  source 1..52: mol_type = other DNA
gtgactggagttcagacgtgtgctcttccgatctcccagaggaaggggaggg

SEQ ID NO: 907 - DNA, 52 bp, synthetic construct
  source 1..52: mol_type = other DNA
gtgactggagttcagacgtgtgctcttccgatcttgcgcgatggaggtctgg

SEQ ID NO: 908 - DNA, 57 bp, synthetic construct
  source 1..57: mol_type = other DNA
gtgactggagttcagacgtgtgctcttccgatctggctatgaactaatgaccccgta

SEQ ID NO: 909 - DNA, 54 bp, synthetic construct
  source 1..54: mol_type = other DNA
gtgactggagttcagacgtgtgctcttccgatctcctcgaccatggtaatagcg

SEQ ID NO: 910 - DNA, 54 bp, synthetic construct
  source 1..54: mol_type = other DNA
gtgactggagttcagacgtgtgctcttccgatcttcacctgtgggagtaacgcg

SEQ ID NO: 911 - DNA, 52 bp, synthetic construct
  source 1..52: mol_type = other DNA
gtgactggagttcagacgtgtgctcttccgatctcacaccccctgctcaccc

SEQ ID NO: 912 - DNA, 54 bp, synthetic construct
  source 1..54: mol_type = other DNA
gtgactggagttcagacgtgtgctcttccgatctgcctcccagatttcggctcc

SEQ ID NO: 913 - DNA, 54 bp, synthetic construct
  source 1..54: mol_type = other DNA
gtgactggagttcagacgtgtgctcttccgatcttaggaacttcttagggcccg

SEQ ID NO: 914 - DNA, 53 bp, synthetic construct
  source 1..53: mol_type = other DNA
gtgactggagttcagacgtgtgctcttccgatctgtgtcatcagccaggctgg

SEQ ID NO: 915 - DNA, 53 bp, synthetic construct
  source 1..53: mol_type = other DNA
gtgactggagttcagacgtgtgctcttccgatctgctctggtggcagtcgaag

SEQ ID NO: 916 - DNA, 52 bp, synthetic construct
  source 1..52: mol_type = other DNA
gtgactggagttcagacgtgtgctcttccgatctggagccaggagctctgag

SEQ ID NO: 917 - DNA, 53 bp, synthetic construct
  source 1..53: mol_type = other DNA
gtgactggagttcagacgtgtgctcttccgatcttggaagaggcagcttggtg

SEQ ID NO: 918 - DNA, 53 bp, synthetic construct
  source 1..53: mol_type = other DNA
gtgactggagttcagacgtgtgctcttccgatctctgctctgagagctcctgg

SEQ ID NO: 919 - DNA, 53 bp, synthetic construct
  source 1..53: mol_type = other DNA
gtgactggagttcagacgtgtgctcttccgatctctaacgaggcttggtcagg

SEQ ID NO: 920 - DNA, 53 bp, synthetic construct
  source 1..53: mol_type = other DNA
gtgactggagttcagacgtgtgctcttccgatctcaccacgctctctgcctta

SEQ ID NO: 921 - DNA, 54 bp, synthetic construct
  source 1..54: mol_type = other DNA
gtgactggagttcagacgtgtgctcttccgatctgctttagatcggcagtggtg

SEQ ID NO: 922 - DNA, 53 bp, synthetic construct
  source 1..53: mol_type = other DNA
gtgactggagttcagacgtgtgctcttccgatctcgagtgggaagcaggcgtg

SEQ ID NO: 923 - DNA, 54 bp, synthetic construct
  source 1..54: mol_type = other DNA
gtgactggagttcagacgtgtgctcttccgatcttcctgaaccagacccagagc

SEQ ID NO: 924 - DNA, 52 bp, synthetic construct
  source 1..52: mol_type = other DNA
gtgactggagttcagacgtgtgctcttccgatctccaggagtgcacagcacc

SEQ ID NO: 925 - DNA, 55 bp, synthetic construct
  source 1..55: mol_type = other DNA
gtgactggagttcagacgtgtgctcttccgatctcccccagaatagaatgacacc

SEQ ID NO: 926 - DNA, 54 bp, synthetic construct
  source 1..54: mol_type = other DNA
gtgactggagttcagacgtgtgctcttccgatctagtgttgaggccccagctac

SEQ ID NO: 927 - DNA, 57 bp, synthetic construct
  source 1..57: mol_type = other DNA
gtgactggagttcagacgtgtgctcttccgatctcagtaatcaataccatgtggctc

SEQ ID NO: 928 - DNA, 53 bp, synthetic construct
  source 1..53: mol_type = other DNA
gtgactggagttcagacgtgtgctcttccgatctaacctgggagcgcctcctc

SEQ ID NO: 929 - DNA, 53 bp, synthetic construct
  source 1..53: mol_type = other DNA
gtgactggagttcagacgtgtgctcttccgatctttgcaacactcccctcccc

SEQ ID NO: 930 - DNA, 53 bp, synthetic construct
  source 1..53: mol_type = other DNA
gtgactggagttcagacgtgtgctcttccgatctccaagtgggcagtttaccg

SEQ ID NO: 931 - DNA, 52 bp, synthetic construct
  source 1..52: mol_type = other DNA
gtgactggagttcagacgtgtgctcttccgatctgccgcacctctccgcctc

SEQ ID NO: 932 - DNA, 53 bp, synthetic construct
  source 1..53: mol_type = other DNA
gtgactggagttcagacgtgtgctcttccgatctcacacacacacgcacgcac

SEQ ID NO: 933 - DNA, 52 bp, synthetic construct
  source 1..52: mol_type = other DNA
gtgactggagttcagacgtgtgctcttccgatctcccctcccccgagccctc

SEQ ID NO: 934 - DNA, 54 bp, synthetic construct
  source 1..54: mol_type = other DNA
gtgactggagttcagacgtgtgctcttccgatctcacacgccagaagccgaacc

SEQ ID NO: 935 - DNA, 53 bp, synthetic construct
  source 1..53: mol_type = other DNA
gtgactggagttcagacgtgtgctcttccgatcttggggatgggctctgtgag

SEQ ID NO: 936 - DNA, 54 bp, synthetic construct
  source 1..54: mol_type = other DNA
gtgactggagttcagacgtgtgctcttccgatctatgctccaattcctccaggg

SEQ ID NO: 937 - DNA, 53 bp, synthetic construct
  source 1..53: mol_type = other DNA
gtgactggagttcagacgtgtgctcttccgatctaatggctggtaccgaggcc

SEQ ID NO: 938 - DNA, 53 bp, synthetic construct
  source 1..53: mol_type = other DNA
gtgactggagttcagacgtgtgctcttccgatctgcctgccagctgcagtatc

SEQ ID NO: 939 - DNA, 55 bp, synthetic construct
  source 1..55: mol_type = other DNA
gtgactggagttcagacgtgtgctcttccgatctccccattgctatcactggagg

SEQ ID NO: 940 - DNA, 54 bp, synthetic construct
  source 1..54: mol_type = other DNA
gtgactggagttcagacgtgtgctcttccgatctcagaggctgaagaggcagtg

SEQ ID NO: 941 - DNA, 53 bp, synthetic construct
  source 1..53: mol_type = other DNA
gtgactggagttcagacgtgtgctcttccgatctggtcaggggctactgtggg

SEQ ID NO: 942 - DNA, 54 bp, synthetic construct
  source 1..54: mol_type = other DNA
gtgactggagttcagacgtgtgctcttccgatctctcgaggggagaatactggg

SEQ ID NO: 943 - DNA, 52 bp, synthetic construct
  source 1..52: mol_type = other DNA
gtgactggagttcagacgtgtgctcttccgatctgggcccagcactgcttcc

SEQ ID NO: 944 - DNA, 53 bp, synthetic construct
  source 1..53: mol_type = other DNA
gtgactggagttcagacgtgtgctcttccgatctccagatggggtcctggagc

SEQ ID NO: 945 - DNA, 54 bp, synthetic construct
  source 1..54: mol_type = other DNA
gtgactggagttcagacgtgtgctcttccgatctacaccacacccaccaccctc

SEQ ID NO: 946 - DNA, 55 bp, synthetic construct
  source 1..55: mol_type = other DNA
gtgactggagttcagacgtgtgctcttccgatctcttctgcaggtaaagctgggc

SEQ ID NO: 947 - DNA, 52 bp, synthetic construct
  source 1..52: mol_type = other DNA
gtgactggagttcagacgtgtgctcttccgatctggctgcagaaggagcggg

SEQ ID NO: 948 - DNA, 53 bp, synthetic construct
  source 1..53: mol_type = other DNA
gtgactggagttcagacgtgtgctcttccgatctgaggcattcatgggagtgg

SEQ ID NO: 949 - DNA, 57 bp, synthetic construct
  source 1..57: mol_type = other DNA
gtgactggagttcagacgtgtgctcttccgatctccagcaataacgtgtagaatgcc

SEQ ID NO: 950 - DNA, 55 bp, synthetic construct
  source 1..55: mol_type = other DNA
gtgactggagttcagacgtgtgctcttccgatctcacaagcacacacaacacaac

SEQ ID NO: 951 - DNA, 48 bp, synthetic construct
  source 1..48: mol_type = other DNA
ggcatttcagtcaggtgcccaatgtaccggcaccttcctagaaactgt

SEQ ID NO: 952 - DNA, 48 bp, synthetic construct
  source 1..48: mol_type = other DNA
ggcatttcagtcaggtgcccaatgtaccgatccttttttctacagtgt

SEQ ID NO: 953 - DNA, 48 bp, synthetic construct
  source 1..48: mol_type = other DNA
ggcatttcagtcaggtgcccaatgtaccaagaaacaacatgaaccaag

SEQ ID NO: 954 - DNA, 48 bp, synthetic construct
  source 1..48: mol_type = other DNA
ggcatttcagtcaggtgcccaatgtaccctaggaaaagctcacctgtc

SEQ ID NO: 955 - DNA, 48 bp, synthetic construct
  source 1..48: mol_type = other DNA
ggcatttcagtcaggtgcccaatgtacctgagatgtgtttgctctgct

SEQ ID NO: 956 - DNA, 48 bp, synthetic construct
  source 1..48: mol_type = other DNA
ggcatttcagtcaggtgcccaatgtaccccgccttccctccactctat

SEQ ID NO: 957 - DNA, 48 bp, synthetic construct
  source 1..48: mol_type = other DNA
ggcatttcagtcaggtgcccaatgtacccctgattatgcatacccata

SEQ ID NO: 958 - DNA, 48 bp, synthetic construct
  source 1..48: mol_type = other DNA
ggcatttcagtcaggtgcccaatgtaccggcaatgtgagggcccggaa

SEQ ID NO: 959 - DNA, 48 bp, synthetic construct
  source 1..48: mol_type = other DNA
ggcatttcagtcaggtgcccaatgtaccctgtagcgaccctttgcagg

SEQ ID NO: 960 - DNA, 48 bp, synthetic construct
  source 1..48: mol_type = other DNA
ggcatttcagtcaggtgcccaatgtaccatggctctcctcaagcgtat

SEQ ID NO: 961 - DNA, 48 bp, synthetic construct
  source 1..48: mol_type = other DNA
ggcatttcagtcaggtgcccaatgtaccggggacgtggttttcctttg

SEQ ID NO: 962 - DNA, 48 bp, synthetic construct
  source 1..48: mol_type = other DNA
ggcatttcagtcaggtgcccaatgtaccaaaggggatacagtggaact

SEQ ID NO: 963 - DNA, 48 bp, synthetic construct
  source 1..48: mol_type = other DNA
ggcatttcagtcaggtgcccaatgtaccactcaagaagaagcctttgg

SEQ ID NO: 964 - DNA, 48 bp, synthetic construct
  source 1..48: mol_type = other DNA
ggcatttcagtcaggtgcccaatgtacctgacacccacctgcttcagg

SEQ ID NO: 965 - DNA, 48 bp, synthetic construct
  source 1..48: mol_type = other DNA
ggcatttcagtcaggtgcccaatgtaccgatagtggcacctggacatg

SEQ ID NO: 966 - DNA, 48 bp, synthetic construct
  source 1..48: mol_type = other DNA
ggcatttcagtcaggtgcccaatgtacccctttacagttgaaaagctg

SEQ ID NO: 967 - DNA, 48 bp, synthetic construct
  source 1..48: mol_type = other DNA
ggcatttcagtcaggtgcccaatgtaccgggcaagaagctcccgctcc

SEQ ID NO: 968 - DNA, 48 bp, synthetic construct
  source 1..48: mol_type = other DNA
ggcatttcagtcaggtgcccaatgtacccagaaaaatttgacctgtga

SEQ ID NO: 969 - DNA, 48 bp, synthetic construct
  source 1..48: mol_type = other DNA
ggcatttcagtcaggtgcccaatgtacctgctgagtgactcgggacag

SEQ ID NO: 970 - DNA, 48 bp, synthetic construct
  source 1..48: mol_type = other DNA
ggcatttcagtcaggtgcccaatgtacctgtcaggtgccggcaccgat

SEQ ID NO: 971 - DNA, 48 bp, synthetic construct
  source 1..48: mol_type = other DNA
ggcatttcagtcaggtgcccaatgtacctaagactgattttctgcccc

SEQ ID NO: 972 - DNA, 48 bp, synthetic construct
  source 1..48: mol_type = other DNA
ggcatttcagtcaggtgcccaatgtaccgataaatccaggtacctggg

SEQ ID NO: 973 - DNA, 48 bp, synthetic construct
  source 1..48: mol_type = other DNA
ggcatttcagtcaggtgcccaatgtaccaggacctgtatataataaga

SEQ ID NO: 974 - DNA, 48 bp, synthetic construct
  source 1..48: mol_type = other DNA
ggcatttcagtcaggtgcccaatgtaccaggtcccaagataactgttt

SEQ ID NO: 975 - DNA, 48 bp, synthetic construct
  source 1..48: mol_type = other DNA
gttccgggtaggcagttcgctccaagctcccacatgtacttagataaa

SEQ ID NO: 976 - DNA, 48 bp, synthetic construct
  source 1..48: mol_type = other DNA
gttccgggtaggcagttcgctccaagctgctaactcttattttgctaa

SEQ ID NO: 977 - DNA, 48 bp, synthetic construct
  source 1..48: mol_type = other DNA
gttccgggtaggcagttcgctccaagcttctgtaccttcaggactgtg

SEQ ID NO: 978 - DNA, 48 bp, synthetic construct
  source 1..48: mol_type = other DNA
gttccgggtaggcagttcgctccaagctcccttcttgatgcctccccg

SEQ ID NO: 979 - DNA, 48 bp, synthetic construct
  source 1..48: mol_type = other DNA
gttccgggtaggcagttcgctccaagctctggaagatctgcagctttt

SEQ ID NO: 980 - DNA, 48 bp, synthetic construct
  source 1..48: mol_type = other DNA
gttccgggtaggcagttcgctccaagctaatctggaacatcgtatggg

SEQ ID NO: 981 - DNA, 48 bp, synthetic construct
  source 1..48: mol_type = other DNA
gttccgggtaggcagttcgctccaagcttatagacaaacgcacaccgg

SEQ ID NO: 982 - DNA, 48 bp, synthetic construct
  source 1..48: mol_type = other DNA
gttccgggtaggcagttcgctccaagctgcttccagaggaactgcttc

SEQ ID NO: 983 - DNA, 48 bp, synthetic construct
  source 1..48: mol_type = other DNA
gttccgggtaggcagttcgctccaagctccaactcacaacgtggcact

SEQ ID NO: 984 - DNA, 48 bp, synthetic construct
  source 1..48: mol_type = other DNA
gttccgggtaggcagttcgctccaagctgtttttttaacctcgactaa

SEQ ID NO: 985 - DNA, 48 bp, synthetic construct
  source 1..48: mol_type = other DNA
gttccgggtaggcagttcgctccaagctttccctgagtggctgctggg

SEQ ID NO: 986 - DNA, 48 bp, synthetic construct
  source 1..48: mol_type = other DNA
gttccgggtaggcagttcgctccaagctgatggacctttagttaagaa

SEQ ID NO: 987 - DNA, 48 bp, synthetic construct
  source 1..48: mol_type = other DNA
gttccgggtaggcagttcgctccaagctcactagcaattgcacctcct

SEQ ID NO: 988 - DNA, 48 bp, synthetic construct
  source 1..48: mol_type = other DNA
gttccgggtaggcagttcgctccaagctcggagagggtcttccccccc

SEQ ID NO: 989 - DNA, 48 bp, synthetic construct
  source 1..48: mol_type = other DNA
gttccgggtaggcagttcgctccaagctacctgttccccctctttctt

SEQ ID NO: 990 - DNA, 48 bp, synthetic construct
  source 1..48: mol_type = other DNA
gttccgggtaggcagttcgctccaagctggtaacccgttttacagaca

SEQ ID NO: 991 - DNA, 48 bp, synthetic construct
  source 1..48: mol_type = other DNA
gttccgggtaggcagttcgctccaagctccaccaggttcacttcctga

SEQ ID NO: 992 - DNA, 48 bp, synthetic construct
  source 1..48: mol_type = other DNA
gttccgggtaggcagttcgctccaagcttcagggttcagcacccacac

SEQ ID NO: 993 - DNA, 48 bp, synthetic construct
  source 1..48: mol_type = other DNA
gttccgggtaggcagttcgctccaagctaatgaaaagcaggaggccgg

SEQ ID NO: 994 - DNA, 48 bp, synthetic construct
  source 1..48: mol_type = other DNA
gttccgggtaggcagttcgctccaagctataccacccttcatagagtg

SEQ ID NO: 995 - DNA, 48 bp, synthetic construct
  source 1..48: mol_type = other DNA
gttccgggtaggcagttcgctccaagctcatctaccccacagcttcca

SEQ ID NO: 996 - DNA, 48 bp, synthetic construct
  source 1..48: mol_type = other DNA
gttccgggtaggcagttcgctccaagctctctgagctagatccatgtc

SEQ ID NO: 997 - DNA, 48 bp, synthetic construct
  source 1..48: mol_type = other DNA
gttccgggtaggcagttcgctccaagcttctttacacatccaggcatt

SEQ ID NO: 998 - DNA, 48 bp, synthetic construct
  source 1..48: mol_type = other DNA
gttccgggtaggcagttcgctccaagctgtgtctctgattagactgct

SEQ ID NO: 999 - DNA, 23 bp, synthetic construct
  source 1..23: mol_type = other DNA
bsgagtcaggtgcccaatgtacc

SEQ ID NO: 1000 - DNA, 22 bp, synthetic construct
  source 1..22: mol_type = other DNA
bsgtaggcagttcgctccaagc

SEQ ID NO: 1001 - DNA, 55 bp, synthetic construct
  source 1..55: mol_type = other DNA
bsgaatgatacggcgaccaccgagatctacaccacagtacactctttccctacac

SEQ ID NO: 1002 - DNA, 24 bp, synthetic construct
  source 1..24: mol_type = other DNA
bsgcaagcagaagacggcatacga

SEQ ID NO: 1003 - DNA, 708 bp, synthetic construct
  source 1..708: mol_type = other DNA
atggtgagcaagggcgaggaggataacatggccatcatcaaggagttcatgcgcttcaaggtgcacatggagggctccgtgaacggccacgagttcgagatcgagggcgagggcgagggccgcccctacgagggcacccagaccgccaagctgaaggtgaccaagggtggccccctgcccttcgcctgggacatcctgtcccctcagttcatgtacggctccaaggcctacgtgaagcaccccgccgacatccccgactacttgaagctgtccttccccgagggcttcaagtgggagcgcgtgatgaacttcgaggacggcggcgtggtgaccgtgacccaggactcctccctgcaggacggcgagttcatctacaaggtgaagctgcgcggcaccaacttcccctccgacggccccgtaatgcagaagaagaccatgggctgggaggcctcctccgagcggatgtaccccgaggacggcgccctgaagggcgagatcaagcagaggctgaagctgaaggacggcggccactacgacgctgaggtcaagaccacctacaaggccaagaagcccgtgcagctgcccggcgcctacaacgtcaacatcaagttggacatcacctcccacaacgaggactacaccatcgtggaacagtacgaacgcgccgagggccgccactccaccggcggcatggacgagctgtacaag

SEQ ID NO: 1004 - DNA, 2400 bp, synthetic construct
  source 1..2400: mol_type = other DNA
ccaaaaaagaagagaaaggtagaagaccccaaggactttccttcagaattgctaagttttttgagtcatgctgtgtttagtaatagaactcttgcttgctttgctatttacaccacaaaggaaaaagctgcactgctatacaagaaaattatggaaaaatattctgtaacctttataagtaggcataacagttataatcataacatactgttttttcttactccacacaggcatagagtgtctgctattaataactatgctcaaaaattgtgtacctttagctttttaatttgtaaaggggttaataaggaatatttgatgtatagtgccttgactagagatcataatcagccataccacatttgtagaggttttacttgctttaaaaaacctcccacacctccccctgaacctgaaacataaaatgaatgcaattgttgttgttaacttgtttattgcagcttataatggttacaaataaagcaatagcatcacaaatttcacaaataaagcatttttttcactgcattctagttgtggtttgtccaaactcatcaatgtatcttatcatgtctggatctgacatggtaagtaagcttgggctgcaggtcgagggacctaataacttcgtatagcatacattatacgaagttatattaagggttccggatcatcaccgcggatggcatcagatgagggcaagcttttcgtcggagggctgagttttgacaccaatgagcagtcactggagcaggtcttctcaaaatatggacagatctcagaagtggtggtcgtgaaggacagggagacccagcgatcgaggggctttgggtttgtcacctttgagaacatcgatgatgccaaggacgccatgatggccatgaacgggaagtctgtggatgggcggcagatccgggtcgaccaggctggcaagtcgtctgataaccgatcccgcgggtaccgaggtggctctgccgggggccggggctttttccgcgggggccgaggccggggccgtgggttctccagaggaggaggggaccgcggctacggggggagccggttcgagtccaggagtgggggctatggaggctccagagactactacagcagccggagtcagggtggcagctgcggtgatcgaagctcgggcgggtcctacagagacagctacgacagttacgctacacacaacgagtaaagcggccgctcgagcctcgactgtgccttctagttgccagccatctgttgtttgcccctcccccgtgccttccttgaccctggaaggtgccactcccactgtcctttcctaataaaatgaggaaattgcatcgcattgtctgagtaggtgtcattctattctggggggtggggtggggcaggacagcaagggggaggattgggaagacaatagcaggcatgctggggatgcggtgggctctatggcttctgagcataggatccccgaattccgaagttcctattctctagaaagtataggaacttcaggtctgaagaggagtttacgtccagccaagctagcttggctgcaggtcgtcgaaattctaccgggtaggggaggcgcttttcccaaggcagtctggagcatgcgctttagcagccccgctgggcacttggcgctacacaagtggcctctggcctcgcacacattccacatccaccggtaggcgccaaccggctccgttctttggtggccccttcgcgccaccttctactcctcccctagtcaggaagttcccccccgccccgcagctcgcgtcgtgcaggacgtgacaaatggaagtagcacgtctcactagtctcgtgcagatggacagcaccgctgagcaatggaagcgggtaggcctttggggcagcggccaatagcagctttgctccttcgctttctgggctcagaggctgggaaggggtgggtccgggggcgggctcaggggcgggctcaggggcggggcgggcgcccgaaggtcctccggaggcccggcattctgcacgcttcaaaagcgcacgtctgccgcgctgttctcctcttcctcatctccgggcctttcgacctgcagcctgttgacaattaatcatcggcatagtatatcggcatagtataatacgacaaggtgaggaactaaaccatgggatcggccattgaacaagatggattgcacgcaggttctccggccgcttgggtggagaggctattcggctatgactgggcacaacagacaatcggctgctctgatgccgccgtgttccggctgtcagcgcaggggcgcccggttctttttgtcaagaccgacctgtccggtgccctgaatgaactgcaggacgaggcagcgcggctatcgtggctggccacgacgggcgttccttgcgcagctgtgctcg

SEQ ID NO: 1005 - DNA, 1713 bp, synthetic construct
  source 1..1713: mol_type = other DNA
agtggtggttcttggagatcctgaggatctgggtcaacaacacaggttgatatccacagccacatgtggctagaaagagtggtcaacctcttgatgtcgcagtagccaagtcctgtcctacccaagtgggtagatgctgcagcagacatgagtagcctgtcataacttcgtatagcatacattatacgaagttataaaacaagggtgatcctctcccaaggtcatcctaattatctgttccttcaagcatgcacagtgtggaaggggacagaatctgggctcttcatgaataaccctaatttctttgtgtataaagataggtggtcaggaccaattgtgtatcctgcatcctgggtgcagggcctaaccacactgtcctctgtctctgcagccaagcggtactgcaagaatgccagccccagcagcagcaccaccagcagctatgcacctagcagcagcagcaacctcagctgtggtggtggcagcagcgccagtagcacgtgtagcaagagcagctttgactacacacatgacatggaggccgcacacatggcagccacagccattctcaacctgtccacacgttgtcgtgaaatgccacagaacctgtccaccaagccacaggacctgtgtactgcccgggtatgcccagggccccagccatgacccatgggagctgtctatgagttcgttcactgccagccctatagccctgtgcctcagaacaaagaaaggccttggtcccctccagccctaacttgtgcctgggacattagcacagccatcacccatggtctttatggtgtctcagttgaatagtacacaaaaccaaaaaagaggtacaacttgacatttaaacaagacagtttagtggcagcatttttagataaatgtgaggctgttccttcaccatgtgcctagtaggtctcacaggtcagagaagccaagaagtgacatccgattgcactcttgattgtctgtggtctcagccaaagctgttagcttggaggcgccttggtgctacaagagatggcagcactcagggaatggtgtctattgttcttcatctgttagaagaaattgtatttatcatgaaaattacttattattttttattttgagattataatacacctagatccatttctcctattaagctattacttacatgtatgtatgaatgtggagagaagcatggttcatctatggagatcagagagtagccagcagaggctctctccttccaccacgtgggcactctgcccactgcagctctggcacccagagcagaagaagaagccattagcatgggtagggaagagagtgagcaggctctgcagggctctaggcaggaagcagtgtgtcagaaagtgcagcctgtgcacttacctgtgccacctgccctctgtaactgaaggttctaggtgctggcagtggttgtcataaatcattgtgatttatgcgatcagaggaaggccgctcggtcacattcagcttttattcctttgatggttttactccacggtagtgggatagtgtcaggagacatgcattcttcatggacctctgggctactgaaggctagtgcagaagcaagccatcgctgtgaaagaatagagataggcatctccaccagggttgtttggtttttccttttttaagaagaatactaagattaggataatggcttcaatatgatgtggtctaaattag

SEQ ID NO: 1006 - DNA, 2898 bp, synthetic construct
  source 1..2898: mol_type = other DNA
atgggcagcagcctggacgacgagcacatcctgagcgccctgctgcagagcgacgacgagctggtcggcgaggacagcgacagcgaggtgagcgaccacgtgagcgaggacgacgtgcagtccgacaccgaggaggccttcatcgacgaggtgcacgaggtgcagcctaccagcagcggctccgagatcctggacgagcagaacgtgatcgagcagcccggcagctccctggccagcaacaggatcctgaccctgccccagaggaccatcaggggcaagaacaagcactgctggtccacctccaagcccaccaggcggagcagggtgtccgccctgaacatcgtgagaagccagaggggccccaccaggatgtgcaggaacatctacgaccccctgctgtgcttcaagctgttcttcaccgacgagatcatcagcgagatcgtgaagtggaccaacgccgagatcagcctgaagaggcgggagagcatgacctccgccaccttcagggacaccaacgaggacgagatctacgccttcttcggcatcctggtgatgaccgccgtgaggaaggacaaccacatgagcaccgacgacctgttcgacagatccctgagcatggtgtacgtgagcgtgatgagcagggacagattcgacttcctgatcagatgcctgaggatggacgacaagagcatcaggcccaccctgcgggagaacgacgtgttcacccccgtgagaaagatctgggacctgttcatccaccagtgcatccagaactacacccctggcgcccacctgaccatcgacgagcagctgctgggcttcaggggcaggtgccccttcagggtctatatccccaacaagcccagcaagtacggcatcaagatcctgatgatgtgcgacagcggcaccaagtacatgatcaacggcatgccctacctgggcaggggcacccagaccaacggcgtgcccctgggcgagtactacgtgaaggagctgtccaagcccgtccacggcagctgcagaaacatcacctgcgacaactggttcaccagcatccccctggccaagaacctgctgcaggagccctacaagctgaccatcgtgggcaccgtgagaagcaacaagagagagatccccgaggtcctgaagaacagcaggtccaggcccgtgggcaccagcatgttctgcttcgacggccccctgaccctggtgtcctacaagcccaagcccgccaagatggtgtacctgctgtccagctgcgacgaggacgccagcatcaacgagagcaccggcaagccccagatggtgatgtactacaaccagaccaagggcggcgtggacaccctggaccagatgtgcagcgtgatgacctgcagcagaaagaccaacaggtggcccatggccctgctgtacggcatgatcaacatcgcctgcatcaacagcttcatcatctacagccacaacgtgagcagcaagggcgagaaggtgcagagccggaaaaagttcatgcggaacctgtacatgggcctgacctccagcttcatgaggaagaggctggaggcccccaccctgaagagatacctgagggacaacatcagcaacatcctgcccaaagaggtgcccggcaccagcgacgacagcaccgaggagcccgtgatgaagaagaggacctactgcacctactgtcccagcaagatcagaagaaaggccagcgccagctgcaagaagtgtaagaaggtcatctgccgggagcacaacatcgacatgtgccagagctgtttcgcggccgccaagctgggcggcggcgcccccgccgtgggcggcggccccaaggccgccgataaaggggccgcaggctacccatacgatgttcctgactatgcgggctatccctatgacgtcccggactatgctgctagctatccatatgacgttccagattacgctggaagcggagctggagacatgagagctgccaacctttggccaagcccgctcatgatcaaacgctctaagaagaacagcctggccttgtccctgacggccgaccagatggtcagtgccttgttggatgctgagccccccatactctattccgagtatgatcctaccagacccttcagtgaagcttcgatgatgggcttactgaccaacctggcagacagggagctggttcacatgatcaactgggcgaagagggtgccaggctttgtggatttgaccctccatgatcaggtccaccttctagaatgtgcctggctagagatcctgatgattggtctcgtctggcgctccatggagcacccagtgaagctactgtttgctcctaacttgctcttggacaggaaccagggaaaatgtgtagagggcatggtggagatcttcgacatgctgctggctacatcatctcggttccgcatgatgaatctgcagggagaggagtttgtgtgcctcaaatctattattttgcttaattctggagtgtacacatttctgtccagcaccctgaagtctctggaagagaaggaccatatccaccgagtcctggacaagatcacagacactttgatccacctgatggccaaggcaggcctgaccctgcagcagcagcaccagcggctggcccagctcctcctcatcctctcccacatcaggcacatgagtaacaaaggcatggagcatctgtacagcatgaagtgcaagaacgtggtgcccctctatgacctgctgctggaggcggcggacgcccaccgcctacatgcgcccactagccgtggaggggcatccgtggaggagacggaccaaagccacttggccactgcgggctctacttcatcgcattccttgcaaaagtattacatcacgggggaggcagagggtttccctgccacagcttaa

What is claimed is:

1. A method for preparing long-read sequence samples for multiplexing, the method comprising:
providing a genomic DNA sample;
barcoding the genomic DNA sample with an adapted Tn5 barcode to generate a barcoded material;
fragmenting the barcoded material, wherein the fragmented barcoded material is longer than about 2 kb; and
amplifying the fragmented barcoded material prior to multiplexing.

2. The method of claim 1, wherein the genomic DNA sample is a low-input genomic DNA sample.

3. The method of claim 2, wherein the low-input genomic DNA sample comprises at least about 250 ng and not more than about 5 μg.

4. The method of claim 1, wherein the adapted Tn5 barcode is pre-loaded with unique universal flanking sequences.

5. The method of claim 4, wherein the unique universal flanking sequences comprise Illumina P5 and P7.

6. The method of claim 1, wherein the fragmenting is performed at a temperature of about 37° C.

7. The method of claim 6, wherein the fragmenting is performed with a buffer comprising PEG, TAPS, and MgCl₂.

8. The method of claim 7, wherein the fragmenting comprises an incubation time of at least about 15 minutes and not more than about 20 minutes.

9. The method of claim 1, wherein the barcoding and fragmenting steps are performed simultaneously in a tagmentation step.

10. The method of claim 1, wherein the amplifying is performed in two rounds of PCR.

11. A method for generating a knockin (KI) model, the method comprising:
providing at least two rAAV donor vectors; and
inserting the more than one rAAV donor vectors with CRISPR/Cas9 to generate the KI model.

12. The method of claim 11, wherein the KI model is a multi-kilobase KI model.

13. The method of claim 11, wherein providing at least two rAAV donor vectors comprises providing at least three rAAV donor vectors.

14. The method of claim 11, wherein the KI model is a mouse embryo KI model.

15. The method of claim 11, wherein the KI model is an iPSC cell line KI model.

16. A knockin (KI) model, wherein the KI model was synthesized according to the method comprising:
providing at least two rAAV donor vectors; and
inserting the more than one rAAV donor vectors with CRISPR/Cas9 to generate the KI model.

17. The KI model of claim 16, wherein the KI model is a multi-kilobase KI model.

18. The KI model of claim 16, wherein providing at least two rAAV donor vectors comprises providing at least three rAAV donor vectors.

19. The KI model of claim 16, wherein the KI model is a mouse embryo KI model.

20. The KI model of claim 16, wherein the KI model is an iPSC cell line KI model.
